(19) United States
(12) Patent Application Publication
(10) Pub. No.: US 2025/0346653 A1
(43) Pub. Date: Nov. 13, 2025

(54) BISPECIFIC ANTIBODIES AND METHOD OF TREATING OCULAR DISEASE

(71) Applicant: Broadwing Bio Inc., South San Francisco, CA (US)

(72) Inventor: Andrew Peterson, South San Francisco, CA (US)

(21) Appl. No.: 18/860,132

(22) PCT Filed: Apr. 28, 2023
(86) PCT No.: PCT/US23/20365

§ 371 Date: Oct. 25, 2024

Related U.S. Application Data
(60) Provisional application No. 63/336,766, filed on Apr. 29, 2022.

(51) Int. Cl. C07K 16/18

(52) U.S. Cl. CPC C07K 16/18; C07K 2317/31; C07K 2317/33; C07K 2317/565; C07K 2317/76; C07K 2317/92; C07K 2317/94

(57) ABSTRACT

The present disclosure relates to the treatment and/or prevention of age-related macular degeneration (AMD), including both neovascular AMD (“wet” AMD) and non-neovascular AMD (“dry” AMD), as well as advanced forms of non-neovascular AMD (geographic atrophy or GA). In particular, the present disclosure provides novel therapeutic bispecific antibodies that target components of the alternative pathway of the complement activation system.

### CROSS REFERENCE TO RELATED APPLICATIONS

[0001] This application claims priority to and the benefit of U.S. Provisional Patent Application No. 63/336,766 filed Apr. 29, 2022, which is incorporated herein by reference in its entirety for all purposes.

### SEQUENCE LISTING

[0002] The text of the computer readable sequence listing filed herewith, titled “40820_601_SequenceListing,” created on Apr. 27, 2023, having a file size of 1,823,343 bytes bytes, is hereby incorporated by reference in its entirety.

### FIELD

[0003] Embodiments of the present disclosure relate to the treatment and/or prevention of age-related macular degeneration (AMD), including both neovascular AMD (“wet” AMD) and non-neovascular AMD (“dry” AMD), as well as advanced forms of non-neovascular AMD (geographic atrophy or GA). In particular, the present disclosure provides novel therapeutic bispecific antibodies that target components of the alternative pathway of the complement activation system.

### BACKGROUND

[0004] Age-Related Macular Degeneration (AMD) is the leading cause of severe vision loss in adults over age 50. The Centers for Disease Control and Prevention estimate that 1.8 million people have AMD and another 7.3 million are at substantial risk for vision loss from AMD. This eye disease occurs when there are changes to the macula, a small portion of the retina that is located on the inside back layer of the eye. AMD is a loss of central vision that can occur in two forms: “dry” (atrophic or non-neovascular) and “wet” (exudative or neovascular). Most people with macular degeneration have the dry form. Geographic atrophy (GA) is considered the late stage of the dry form of AMD, characterized by focal and progressive loss of photoreceptors. GA is less common than neovascular AMD, and it is responsible for 10-20% of cases of legal blindness in this condition, affecting more than 5 million people worldwide. Currently there is no approved or effective treatment to prevent either the onset or progression of GA; however, in recent years, significant progress has been made in understanding the pathogenesis of GA, which has led to a number of new potential therapies. Treatments of wet AMD are rapidly evolving and some now target specific biochemical events such as angiogenesis. The use of pharmacotherapy targeting vascular endothelial growth factor (VEGF) has been shown to slow vision loss and even lead to vision improvement in some patients with wet macular degeneration. However, the ability to treat both wet and dry AMD with a single biologic has not been established.

### SUMMARY

[0005] Embodiments of the present disclosure include a bispecific antibody, or an antigen binding fragment thereof, which specifically binds human Complement Factor H Related 4 (CFHR) and human Complement Component 3 (C3). In some embodiments, the human CFHR4 is the CFHR4 b variant (CFHR4b), which is optionally a polypeptide comprising or consisting of the amino acid sequence of SEQ ID NO: 580. In some embodiments, the human C3 is the b variant of C3 (C3b), which is optionally a polypeptide comprising or consisting of the amino acid sequence of SEQ ID NO: 1645.

[0006] In some embodiments, the bispecific antibody or fragment thereof is monoclonal, optionally recombinant. In some embodiments, the bispecific antibody or fragment thereof is human, humanized, or chimeric. In some embodiments, the bispecific antibody or fragment thereof is a full length antibody, a single chain antibody, a single chain variable fragment (scFv), a variable fragment (Fv), a fragment antigen-binding region (Fab), a Fab-C, a Fab′-SH, a (Fab′) 2, a single-domain antibody (sdAb), a VHH antibody, a nanobody, a camelid-derived single-domain antibody, a shark IgNAR-derived single-domain antibody fragment (VNAR), a diabody, a triabody, an anticalin or an aptamer, optionally wherein the antibody is a full length antibody comprising an Fc region such as a human IgG1, IgG2, IgG3 or IgG4 region.

[0007] In some embodiments, the bispecific antibody or fragment thereof is conjugated to at least one additional moiety, optionally selected from: an antigen binding moiety, such as an antibody or antigen-binding fragment thereof, which is capable of specific binding to a target which is not human CFHR4 or human C3, preferably wherein said target is expressed in the human eye; a therapeutic or cytotoxic moiety; a detection moiety; a purification moiety; a half-life extension moiety, optionally a polypeptide that is at least 20 amino acids in length and comprises any combination of G, A, S T, E, and P residue, which polypeptide is conjugated to the C- or N-terminus of the antibody.

[0008] In some embodiments, the bispecific antibody or fragment thereof is a polypeptide comprising: one, two or all three HCDRs of any one of the exemplary CFHR4 antibodies the sequences of which are provided in Table 3; and one, two or all three of the corresponding LCDRs of said exemplary antibody; and/or a VH sequence having at least 90% identity to the VH sequence of any one of the exemplary CFHR4 antibodies the sequences of which are provided in Table 4; and optionally a VL sequence having at least 90% identity to the corresponding VL sequence of said exemplary antibody, preferably wherein variation is not permitted in the HCDRs or LCDRs; and/or all six CDRs of any one of the exemplary CFHR4 antibodies the sequences of which are provided in Table 3; the VHI and VL sequences of any one of the exemplary CFHR4 antibodies the sequences of which are provided in Table 4; and/or the full length heavy chain (VH+constant) sequence of any one of the exemplary CFHR4 antibodies the sequences of which are provided in Table 5; and optionally the corresponding full length light chain (VL+constant) sequence of said exemplary antibody.

[0009] In some embodiments, the bispecific antibody or fragment thereof is a polypeptide comprising: one, two or all three HCDRs of any one of the exemplary C3 antibodies the sequences of which are provided in Table 6; and one, two or all three of the corresponding LCDRs of said exemplary antibody; and/or a VH sequence having at least 90% identity to the VH sequence of any one of the exemplary C3 antibodies the sequences of which are provided in Table 7; and optionally a VL sequence having at least 90% identity to the corresponding VL sequence of said exemplary antibody provided in Table 8, preferably wherein variation is not permitted in the HCDRs or LCDRs; and/or all six CDRs of any one of the exemplary C3 antibodies the sequences of which are provided in Table 6; the VH and VL sequences of any one of the exemplary C3 antibodies the sequences of which are provided in Tables 7 and 8; and/or the full length heavy chain (VH+constant) sequence of any one of the exemplary C3 antibodies the sequences of which are provided in Table 9; and optionally the corresponding full length light chain (VL+constant) sequence of said exemplary antibody provided in Table 10.

[0010] Embodiments of the present disclosure also include a polynucleotide encoding the bispecific antibody or fragment thereof. In some embodiments, the polynucleotide comprises or consists of a nucleic acid sequence having at least 70%, 80%, 90%, or 100% identity to a nucleic acid sequence of any one of the exemplary antibodies the sequences of which are provided in Tables 5, 9, and 10. Embodiments of the present disclosure also include an expression vector comprising the polynucleotide, which is optionally an adeno-associated virus (AAV) vector, a lentiviral (LV) vector, a herpes simplex virus (HSV) vector, or a retrovirus vector.

[0011] Embodiments of the present disclosure also include a pharmaceutical composition comprising the bispecific antibody or fragment thereof, the corresponding polynucleotide, or the vector comprising the polynucleotide. In some embodiments, the composition comprises at least one pharmaceutically acceptable carrier, diluent or preservative; and/or at least one additional active ingredient.

[0012] In some embodiments, the pharmaceutical composition is suitable for ocular administration to a subject, optionally by delivery using a conjunctival insert, a contact lens, a gel, a nanoparticle, a mucoadhesive polymer, an ointment, a solution, a suspension, eye drops, and/or an implant, preferably by injection into the vitreous fluid.

[0013] Embodiments of the present disclosure also include the bispecific antibody or fragment thereof, the corresponding polynucleotide, the vector comprising the polynucleotide, or the pharmaceutical composition, for use as a medicament, optionally for use in a method of treating a disease of the eye in a subject. In some embodiments, the disease is characterized by increased activation of the complement system, in particular the alternative pathway, and in particular within the eye of the subject, for example in drusen or retinal pigment epithelium (RPE) cells of the subject. In some embodiments, the method comprises ocular administration of the antibody, preferably by injection into the vitreous fluid, and said administration preferably relieves at least one symptom in the subject selected from visual distortion, reduced central vision, blurred vision, and/or difficulty adapting to low light. In some embodiments, the disease is age-related macular degeneration (AMD), including dry AMD, which may be at an early, intermediate or advanced stage (the latter otherwise known as geographic atrophy, GA).

[0014] In accordance with the above, embodiments of the present disclosure include a bispecific antibody comprising a first antigen-binding site directed against Complement Factor H Related 4 (CFHR4) and a second antigen-binding site directed against Complement Component 3 (C3). In some embodiments, the first anti-CFHR4 antigen-binding site comprises a heavy chain variable region (VH) comprising complementarity determining regions (CDRs) HCDR1, HCDR2, and HCDR3 from at least one of SEQ ID NOs: 260-265, 284-293, 324-334, and 368-380; and a light chain variable region (VL) comprising complementarity determining regions (CDRs) LCDR1, LCDR2, and LCDR3 from at least one of SEQ ID NOs: 272-277, 304-313, 346-356, and 394-406; and the second anti-C3 antigen-binding site comprises a heavy chain variable region (VH) comprising complementarity determining regions (CDRs) HCDR1, HCDR2, and HCDR3; and a light chain variable region (VL) comprising complementarity determining regions (CDRs) LCDR1, LCDR2, and LCDR3.

[0015] Embodiments of the present disclosure include a bispecific antibody comprising a first antigen-binding site directed against Complement Factor H Related 4 (CFHR4) and a second antigen-binding site directed against Complement Component 3 (C3). In some embodiments, the first anti-CFHR4 antigen-binding site comprises a heavy chain variable region (VH) comprising complementarity determining regions (CDRs) HCDR1, HCDR2, and HCDR3; and a light chain variable region (VL) comprising complementarity determining regions (CDRs) LCDR1, LCDR2, and LCDR3; and the second anti-C3 antigen-binding site comprises a heavy chain variable region (VH) comprising complementarity determining regions (CDRs) HCDR1, HCDR2, and HCDR3 from at least one of SEQ ID NOs: 1127-1200; and a light chain variable region (VL) comprising complementarity determining regions (CDRs) LCDR1, LCDR2, and LCDR3 from at least one of SEQ ID NOs: 1275-1348.

[0016] Embodiments of the present disclosure include a bispecific antibody comprising a first antigen-binding site directed against Complement Factor H Related 4 (CFHR4) and a second antigen-binding site directed against Complement Component 3 (C3). In some embodiments, the first anti-CFHR4 antigen-binding site comprises a heavy chain variable region (VH) comprising complementarity determining regions (CDRs) HCDR1, HCDR2, and HCDR3 from at least one of SEQ ID NOs: 260-265, 284-293, 324-334, and 368-380; and a light chain variable region (VL) comprising complementarity determining regions (CDRs) LCDR1, LCDR2, and LCDR3 from at least one of SEQ ID NOs: 272-277, 304-313, 346-356, and 394-406; and the second anti-C3 antigen-binding site comprises a heavy chain variable region (VH) comprising complementarity determining regions (CDRs) HCDR1, HCDR2, and HCDR3 from at least one of SEQ ID NOs: 1127-1200; and a light chain variable region (VL) comprising complementarity determining regions (CDRs) LCDR1, LCDR2, and LCDR3 from at least one of SEQ ID NOs: 1275-1348.

[0017] In some embodiments, the anti-CFHR4 HCDR1 comprises the amino acid sequence of SEQ ID NO: 2; the anti-CFHR4 HCDR2 comprises the amino acid sequence of SEQ ID NO: 9; and the anti-CFHR4 HCDR3 comprises the amino acid sequence of SEQ ID NO: 15. In some embodiments, the anti-CFHR4 HCDR1 comprises the amino acid sequence of SEQ ID NO: 3; the anti-CFHR4 HCDR2 comprises the amino acid sequence of SEQ ID NO: 10; and the anti-CFHR4 HCDR3 comprises the amino acid sequence of SEQ ID NO: 16. In some embodiments, the anti-CFHR4 HCDR1 comprises the amino acid sequence of SEQ ID NO: 4; the anti-CFHR4 HCDR2 comprises the amino acid sequence of SEQ ID NO: 11; and the anti-CFHR4 HCDR3 comprises the amino acid sequence of SEQ ID NO: 17. In some embodiments, the anti-CFHR4 HCDR1 comprises the amino acid sequence of SEQ ID NO: 5; the anti-CFHR4 HCDR2 comprises the amino acid sequence of SEQ ID NO: 12; and the anti-CFHR4 HCDR3 comprises the amino acid sequence of SEQ ID NO: 18. In some embodiments, the anti-CFHR4 HCDR1 comprises the amino acid sequence of SEQ ID NO: 6; the anti-CFHR4 HCDR2 comprises the amino acid sequence of SEQ ID NO: 13; and the anti-CFHR4 HCDR3 comprises the amino acid sequence of SEQ ID NO: 19. In some embodiments, the anti-CFHR4 HCDR1 comprises the amino acid sequence of SEQ ID NO: 7; the anti-CFHR4 HCDR2 comprises the amino acid sequence of SEQ ID NO: 14; and the anti-CFHR4 HCDR3 comprises the amino acid sequence of SEQ ID NO: 20. In some embodiments, the anti-CFHR4 HCDR1 comprises the amino acid sequence of SEQ ID NO: 22; the anti-CFHR4 HCDR2 comprises the amino acid sequence of SEQ ID NO: 33; and the anti-CFHR4 HCDR3 comprises the amino acid sequence of SEQ ID NO: 43. In some embodiments, the anti-CFHR4 HCDR1 comprises the amino acid sequence of SEQ ID NO: 23; the anti-CFHR4 HCDR2 comprises the amino acid sequence of SEQ ID NO: 34; and the anti-CFHR4 HCDR3 comprises the amino acid sequence of SEQ ID NO: 44. In some embodiments, the anti-CFHR4 HCDR1 comprises the amino acid sequence of SEQ ID NO: 24; the anti-CFHR4 HCDR2 comprises the amino acid sequence of SEQ ID NO: 35; and the anti-CFHR4 HCDR3 comprises the amino acid sequence of SEQ ID NO: 45. In some embodiments, the anti-CFHR4 HCDR1 comprises the amino acid sequence of SEQ ID NO: 25; the anti-CFHR4 HCDR2 comprises the amino acid sequence of SEQ ID NO: 36; and the anti-CFHR4 HCDR3 comprises the amino acid sequence of SEQ ID NO: 46. In some embodiments, the anti-CFHR4 HCDR1 comprises the amino acid sequence of SEQ ID NO: 26; the anti-CFHR4 HCDR2 comprises the amino acid sequence of SEQ ID NO: 37; and the anti-CFHR4 HCDR3 comprises the amino acid sequence of SEQ ID NO: 47. In some embodiments, the anti-CFHR4 HCDR1 comprises the amino acid sequence of SEQ ID NO: 27; the anti-CFHR4 HCDR2 comprises the amino acid sequence of SEQ ID NO: 38; and the anti-CFHR4 HCDR3 comprises the amino acid sequence of SEQ ID NO: 48. In some embodiments, the anti-CFHR4 HCDR1 comprises the amino acid sequence of SEQ ID NO: 28; the anti-CFHR4 HCDR2 comprises the amino acid sequence of SEQ ID NO: 39; and the anti-CFHR4 HCDR3 comprises the amino acid sequence of SEQ ID NO: 49. In some embodiments, the anti-CFHR4 HCDR1 comprises the amino acid sequence of SEQ ID NO: 29; the anti-CFHR4 HCDR2 comprises the amino acid sequence of SEQ ID NO: 40; and the anti-CFHR4 HCDR3 comprises the amino acid sequence of SEQ ID NO: 50. In some embodiments, the anti-CFHR4 HCDR1 comprises the amino acid sequence of SEQ ID NO: 30; the anti-CFHR4 HCDR2 comprises the amino acid sequence of SEQ ID NO: 41; and the anti-CFHR4 HCDR3 comprises the amino acid sequence of SEQ ID NO: 51. In some embodiments, the anti-CFHR4 HCDR1 comprises the amino acid sequence of SEQ ID NO: 31; the anti-CFHR4 HCDR2 comprises the amino acid sequence of SEQ ID NO: 42; and the anti-CFHR4 HCDR3 comprises the amino acid sequence of SEQ ID NO: 52. In some embodiments, the anti-CFHR4 HCDR1 comprises the amino acid sequence of SEQ ID NO: 54; the anti-CFHR4 HCDR2 comprises the amino acid sequence of SEQ ID NO: 66; and the anti-CFHR4 HCDR3 comprises the amino acid sequence of SEQ ID NO: 77. In some embodiments, the anti-CFHR4 HCDR1 comprises the amino acid sequence of SEQ ID NO: 55; the anti-CFHR4 HCDR2 comprises the amino acid sequence of SEQ ID NO: 67; and the anti-CFHR4 HCDR3 comprises the amino acid sequence of SEQ ID NO: 78. In some embodiments, the anti-CFHR4 HCDR1 comprises the amino acid sequence of SEQ ID NO: 56; the anti-CFHR4 HCDR2 comprises the amino acid sequence of SEQ ID NO: 68; and the anti-CFHR4 HCDR3 comprises the amino acid sequence of SEQ ID NO: 79. In some embodiments, the anti-CFHR4 HCDR1 comprises the amino acid sequence of SEQ ID NO: 57; the anti-CFHR4 HCDR2 comprises the amino acid sequence of SEQ ID NO: 69; and the anti-CFHR4 HCDR3 comprises the amino acid sequence of SEQ ID NO: 80. In some embodiments, the anti-CFHR4 HCDR1 comprises the amino acid sequence of SEQ ID NO: 58; the anti-CFHR4 HCDR2 comprises the amino acid sequence of SEQ ID NO: 70; and the anti-CFHR4 HCDR3 comprises the amino acid sequence of SEQ ID NO: 81. In some embodiments, the anti-CFHR4 HCDR1 comprises the amino acid sequence of SEQ ID NO: 59; the anti-CFHR4 HCDR2 comprises the amino acid sequence of SEQ ID NO: 71; and the anti-CFHR4 HCDR3 comprises the amino acid sequence of SEQ ID NO: 82. In some embodiments, the anti-CFHR4 HCDR1 comprises the amino acid sequence of SEQ ID NO: 60; the anti-CFHR4 HCDR2 comprises the amino acid sequence of SEQ ID NO: 72; and the anti-CFHR4 HCDR3 comprises the amino acid sequence of SEQ ID NO: 83. In some embodiments, the anti-CFHR4 HCDR1 comprises the amino acid sequence of SEQ ID NO: 61; the anti-CFHR4 HCDR2 comprises the amino acid sequence of SEQ ID NO: 73; and the anti-CFHR4 HCDR3 comprises the amino acid sequence of SEQ ID NO: 84. In some embodiments, the anti-CFHR4 HCDR1 comprises the amino acid sequence of SEQ ID NO: 62; the anti-CFHR4 HCDR2 comprises the amino acid sequence of SEQ ID NO: 74; and the anti-CFHR4 HCDR3 comprises the amino acid sequence of SEQ ID NO: 85. In some embodiments, the anti-CFHR4 HCDR1 comprises the amino acid sequence of SEQ ID NO: 63; the anti-CFHR4 HCDR2 comprises the amino acid sequence of SEQ ID NO: 75; and the anti-CFHR4 HCDR3 comprises the amino acid sequence of SEQ ID NO: 86. In some embodiments, the anti-CFHR4 HCDR1 comprises the amino acid sequence of SEQ ID NO: 64; the anti-CFHR4 HCDR2 comprises the amino acid sequence of SEQ ID NO: 76; and the anti-CFHR4 HCDR3 comprises the amino acid sequence of SEQ ID NO: 87. In some embodiments, the anti-CFHR4 HCDR1 comprises the amino acid sequence of SEQ ID NO: 89; the anti-CFHR4 HCDR2 comprises the amino acid sequence of SEQ ID NO: 103; and the anti-CFHR4 HCDR3 comprises the amino acid sequence of SEQ ID NO: 116. In some embodiments, the anti-CFHR4 HCDR1 comprises the amino acid sequence of SEQ ID NO: 90; the anti-CFHR4 HCDR2 comprises the amino acid sequence of SEQ ID NO: 104; and the anti-CFHR4 HCDR3 comprises the amino acid sequence of SEQ ID NO: 117. In some embodiments, the anti-CFHR4 HCDR1 comprises the amino acid sequence of SEQ ID NO: 91; the anti-CFHR4 HCDR2 comprises the amino acid sequence of SEQ ID NO: 105; and the anti-CFHR4 HCDR3 comprises the amino acid sequence of SEQ ID NO: 118. In some embodiments, the anti-CFHR4 HCDR1 comprises the amino acid sequence of SEQ ID NO: 92; the anti-CFHR4 HCDR2 comprises the amino acid sequence of SEQ ID NO: 106; and the anti-CFHR4 HCDR3 comprises the amino acid sequence of SEQ ID NO: 119. In some embodiments, the anti-CFHR4 HCDR1 comprises the amino acid sequence of SEQ ID NO: 93; the anti-CFHR4 HCDR2 comprises the amino acid sequence of SEQ ID NO: 107; and the anti-CFHR4 HCDR3 comprises the amino acid sequence of SEQ ID NO: 120. In some embodiments, the anti-CFHR4 HCDR1 comprises the amino acid sequence of SEQ ID NO: 94; the anti-CFHR4 HCDR2 comprises the amino acid sequence of SEQ ID NO: 108; and the anti-CFHR4 HCDR3 comprises the amino acid sequence of SEQ ID NO: 121. In some embodiments, the anti-CFHR4 HCDR1 comprises the amino acid sequence of SEQ ID NO: 95; the anti-CFHR4 HCDR2 comprises the amino acid sequence of SEQ ID NO: 109; and the anti-CFHR4 HCDR3 comprises the amino acid sequence of SEQ ID NO: 122. In some embodiments, the anti-CFHR4 HCDR1 comprises the amino acid sequence of SEQ ID NO: 96; the anti-CFHR4 HCDR2 comprises the amino acid sequence of SEQ ID NO: 110; and the anti-CFHR4 HCDR3 comprises the amino acid sequence of SEQ ID NO: 123. In some embodiments, the anti-CFHR4 HCDR1 comprises the amino acid sequence of SEQ ID NO: 97; the anti-CFHR4 HCDR2 comprises the amino acid sequence of SEQ ID NO: 111; and the anti-CFHR4 HCDR3 comprises the amino acid sequence of SEQ ID NO: 124. In some embodiments, the anti-CFHR4 HCDR1 comprises the amino acid sequence of SEQ ID NO: 98; the anti-CFHR4 HCDR2 comprises the amino acid sequence of SEQ ID NO: 112; and the anti-CFHR4 HCDR3 comprises the amino acid sequence of SEQ ID NO: 125. In some embodiments, the anti-CFHR4 HCDR1 comprises the amino acid sequence of SEQ ID NO: 99; the anti-CFHR4 HCDR2 comprises the amino acid sequence of SEQ ID NO: 113; and the HCDR3 comprises the amino acid sequence of SEQ ID NO: 126. In some embodiments, the anti-CFHR4 HCDR1 comprises the amino acid sequence of SEQ ID NO: 100; the HCDR2 comprises the amino acid sequence of SEQ ID NO: 114; and the HCDR3 comprises the amino acid sequence of SEQ ID NO: 127. In some embodiments, the anti-CFHR4 HCDR1 comprises the amino acid sequence of SEQ ID NO: 101; the anti-CFHR4 HCDR2 comprises the amino acid sequence of SEQ ID NO: 115; and the anti-CFHR4 HCDR3 comprises the amino acid sequence of SEQ ID NO: 128.

[0018] In some embodiments, the anti-CFHR4 LCDR1 comprises the amino acid sequence of SEQ ID NO: 130; the anti-CFHR4 LCDR2 comprises the amino acid sequence of SEQ ID NO: 153; and the anti-CFHR4 LCDR3 comprises the amino acid sequence of SEQ ID NO: 175. In some embodiments, the anti-CFHR4 LCDR1 comprises the amino acid sequence of SEQ ID NO: 131; the anti-CFHR4 LCDR2 comprises the amino acid sequence of SEQ ID NO: 154; and the anti-CFHR4 LCDR3 comprises the amino acid sequence of SEQ ID NO: 176. In some embodiments, the anti-CFHR4 LCDR1 comprises the amino acid sequence of SEQ ID NO: 132; the anti-CFHR4 LCDR2 comprises the amino acid sequence of SEQ ID NO: 155; and the anti-CFHR4 LCDR3 comprises the amino acid sequence of SEQ ID NO: 177. In some embodiments, the anti-CFHR4 LCDR1 comprises the amino acid sequence of SEQ ID NO: 133; the anti-CFHR4 LCDR2 comprises the amino acid sequence of SEQ ID NO: 156; and the anti-CFHR4 LCDR3 comprises the amino acid sequence of SEQ ID NO: 178. In some embodiments, the anti-CFHR4 LCDR1 comprises the amino acid sequence of SEQ ID NO: 134; the anti-CFHR4 LCDR2 comprises the amino acid sequence of SEQ ID NO: 157; and the anti-CFHR4 LCDR3 comprises the amino acid sequence of SEQ ID NO: 179. In some embodiments, the anti-CFHR4 LCDR1 comprises the amino acid sequence of SEQ ID NO: 135; the anti-CFHR4 LCDR2 comprises the amino acid sequence of SEQ ID NO: 158; and the anti-CFHR4 LCDR3 comprises the amino acid sequence of SEQ ID NO: 180. In some embodiments, the anti-CFHR4 LCDR1 comprises the amino acid sequence of SEQ ID NO: 136; the anti-CFHR4 LCDR2 comprises the amino acid sequence of SEQ ID NO: 159; and the anti-CFHR4 LCDR3 comprises the amino acid sequence of SEQ ID NO: 181. In some embodiments, the anti-CFHR4 LCDR1 comprises the amino acid sequence of SEQ ID NO: 137; the anti-CFHR4 LCDR2 comprises the amino acid sequence of SEQ ID NO: 160; and the anti-CFHR4 LCDR3 comprises the amino acid sequence of SEQ ID NO: 182. In some embodiments, the anti-CFHR4 LCDR1 comprises the amino acid sequence of SEQ ID NO: 138; the anti-CFHR4 LCDR2 comprises the amino acid sequence of SEQ ID NO: 161; and the anti-CFHR4 LCDR3 comprises the amino acid sequence of SEQ ID NO: 183. In some embodiments, the anti-CFHR4 LCDR1 comprises the amino acid sequence of SEQ ID NO: 139; the anti-CFHR4 LCDR2 comprises the amino acid sequence of SEQ ID NO: 162; and the anti-CFHR4 LCDR3 comprises the amino acid sequence of SEQ ID NO: 184. In some embodiments, the anti-CFHR4 LCDR1 comprises the amino acid sequence of SEQ ID NO: 140; the anti-CFHR4 LCDR2 comprises the amino acid sequence of SEQ ID NO: 163; and the anti-CFHR4 LCDR3 comprises the amino acid sequence of SEQ ID NO: 185. In some embodiments, the anti-CFHR4 LCDR1 comprises the amino acid sequence of SEQ ID NO: 141; the anti-CFHR4 LCDR2 comprises the amino acid sequence of SEQ ID NO: 164; and the anti-CFHR4 LCDR3 comprises the amino acid sequence of SEQ ID NO: 186. In some embodiments, the anti-CFHR4 LCDR1 comprises the amino acid sequence of SEQ ID NO: 142; the anti-CFHR4 LCDR2 comprises the amino acid sequence of SEQ ID NO: 165; and the anti-CFHR4 LCDR3 comprises the amino acid sequence of SEQ ID NO: 187. In some embodiments, the anti-CFHR4 LCDR1 comprises the amino acid sequence of SEQ ID NO: 143; the anti-CFHR4 LCDR2 comprises the amino acid sequence of SEQ ID NO: 166; and the anti-CFHR4 LCDR3 comprises the amino acid sequence of SEQ ID NO: 188. In some embodiments, the anti-CFHR4 LCDR1 comprises the amino acid sequence of SEQ ID NO: 144; the anti-CFHR4 LCDR2 comprises the amino acid sequence of SEQ ID NO: 167; and the anti-CFHR4 LCDR3 comprises the amino acid sequence of SEQ ID NO: 189. In some embodiments, the anti-CFHR4 LCDR1 comprises the amino acid sequence of SEQ ID NO: 145; the anti-CFHR4 LCDR2 comprises the amino acid sequence of SEQ ID NO: 168; and the anti-CFHR4 LCDR3 comprises the amino acid sequence of SEQ ID NO: 190. In some embodiments, the anti-CFHR4 LCDR1 comprises the amino acid sequence of SEQ ID NO: 146; the anti-CFHR4 LCDR2 comprises the amino acid sequence of SEQ ID NO: 169; and the anti-CFHR4 LCDR3 comprises the amino acid sequence of SEQ ID NO: 191. In some embodiments, the anti-CFHR4 LCDR1 comprises the amino acid sequence of SEQ ID NO: 147; the anti-CFHR4 LCDR2 comprises the amino acid sequence of SEQ ID NO: 170; and the anti-CFHR4 LCDR3 comprises the amino acid sequence of SEQ ID NO: 192. In some embodiments, the anti-CFHR4 LCDR1 comprises the amino acid sequence of SEQ ID NO: 148; the anti-CFHR4 LCDR2 comprises the amino acid sequence of SEQ ID NO: 171; and the anti-CFHR4 LCDR3 comprises the amino acid sequence of SEQ ID NO: 193. In some embodiments, the anti-CFHR4 LCDR1 comprises the amino acid sequence of SEQ ID NO: 149; the anti-CFHR4 LCDR2 comprises the amino acid sequence of SEQ ID NO: 172; and the anti-CFHR4 LCDR3 comprises the amino acid sequence of SEQ ID NO: 194. In some embodiments, the anti-CFHR4 LCDR1 comprises the amino acid sequence of SEQ ID NO: 150; the anti-CFHR4 LCDR2 comprises the amino acid sequence of SEQ ID NO: 173; and the anti-CFHR4 LCDR3 comprises the amino acid sequence of SEQ ID NO: 195. In some embodiments, the anti-CFHR4 LCDR1 comprises the amino acid sequence of SEQ ID NO: 151; the anti-CFHR4 LCDR2 comprises the amino acid sequence of SEQ ID NO: 174; and the anti-CFHR4 LCDR3 comprises the amino acid sequence of SEQ ID NO: 196. In some embodiments, the anti-CFHR4 LCDR1 comprises the amino acid sequence of SEQ ID NO: 198; the anti-CFHR4 LCDR2 comprises the amino acid sequence of SEQ ID NO: 201; and the anti-CFHR4 LCDR3 comprises the amino acid sequence of SEQ ID NO: 204. In some embodiments, the anti-CFHR4 LCDR1 comprises the amino acid sequence of SEQ ID NO: 199; the anti-CFHR4 LCDR2 comprises the amino acid sequence of SEQ ID NO: 202; and the anti-CFHR4 LCDR3 comprises the amino acid sequence of SEQ ID NO: 205. In some embodiments, the anti-CFHR4 LCDR1 comprises the amino acid sequence of SEQ ID NO: 207; the anti-CFHR4 LCDR2 comprises the amino acid sequence of SEQ ID NO: 217; and the anti-CFHR4 LCDR3 comprises the amino acid sequence of SEQ ID NO: 227. In some embodiments, the anti-CFHR4 LCDR1 comprises the amino acid sequence of SEQ ID NO: 208; the anti-CFHR4 LCDR2 comprises the amino acid sequence of SEQ ID NO: 218; and the anti-CFHR4 LCDR3 comprises the amino acid sequence of SEQ ID NO: 228. In some embodiments, the anti-CFHR4 LCDR1 comprises the amino acid sequence of SEQ ID NO: 209; the anti-CFHR4 LCDR2 comprises the amino acid sequence of SEQ ID NO: 219; and the anti-CFHR4 LCDR3 comprises the amino acid sequence of SEQ ID NO: 229. In some embodiments, the anti-CFHR4 LCDR1 comprises the amino acid sequence of SEQ ID NO: 210; the anti-CFHR4 LCDR2 comprises the amino acid sequence of SEQ ID NO: 220; and the anti-CFHR4 LCDR3 comprises the amino acid sequence of SEQ ID NO: 230. In some embodiments, the anti-CFHR4 LCDR1 comprises the amino acid sequence of SEQ ID NO: 211; the anti-CFHR4 LCDR2 comprises the amino acid sequence of SEQ ID NO: 221; and the anti-CFHR4 LCDR3 comprises the amino acid sequence of SEQ ID NO: 231. In some embodiments, the anti-CFHR4 LCDR1 comprises the amino acid sequence of SEQ ID NO: 212; the anti-CFHR4 LCDR2 comprises the amino acid sequence of SEQ ID NO: 222; and the anti-CFHR4 LCDR3 comprises the amino acid sequence of SEQ ID NO: 232. In some embodiments, the anti-CFHR4 LCDR1 comprises the amino acid sequence of SEQ ID NO: 213; the anti-CFHR4 LCDR2 comprises the amino acid sequence of SEQ ID NO: 223; and the anti-CFHR4 LCDR3 comprises the amino acid sequence of SEQ ID NO: 233. In some embodiments, the anti-CFHR4 LCDR1 comprises the amino acid sequence of SEQ ID NO: 214; the anti-CFHR4 LCDR2 comprises the amino acid sequence of SEQ ID NO: 224; and the anti-CFHR4 LCDR3 comprises the amino acid sequence of SEQ ID NO: 234. In some embodiments, the anti-CFHR4 LCDR1 comprises the amino acid sequence of SEQ ID NO: 215; the anti-CFHR4 LCDR2 comprises the amino acid sequence of SEQ ID NO: 225; and the anti-CFHR4 LCDR3 comprises the amino acid sequence of SEQ ID NO: 235. In some embodiments, the anti-CFHR4 LCDR1 comprises the amino acid sequence of SEQ ID NO: 237; the anti-CFHR4 LCDR2 comprises the amino acid sequence of SEQ ID NO: 245; and the anti-CFHR4 LCDR3 comprises the amino acid sequence of SEQ ID NO: 253. In some embodiments, the anti-CFHR4 LCDR1 comprises the amino acid sequence of SEQ ID NO: 238; the anti-CFHR4 LCDR2 comprises the amino acid sequence of SEQ ID NO: 246; and the anti-CFHR4 LCDR3 comprises the amino acid sequence of SEQ ID NO: 254. In some embodiments, the anti-CFHR4 LCDR1 comprises the amino acid sequence of SEQ ID NO: 239; the anti-CFHR4 LCDR2 comprises the amino acid sequence of SEQ ID NO: 247; and the anti-CFHR4 LCDR3 comprises the amino acid sequence of SEQ ID NO: 255. In some embodiments, the anti-CFHR4 LCDR1 comprises the amino acid sequence of SEQ ID NO: 240; the anti-CFHR4 LCDR2 comprises the amino acid sequence of SEQ ID NO: 248; and the anti-CFHR4 LCDR3 comprises the amino acid sequence of SEQ ID NO: 256. In some embodiments, the anti-CFHR4 LCDR1 comprises the amino acid sequence of SEQ ID NO: 241; the anti-CFHR4 LCDR2 comprises the amino acid sequence of SEQ ID NO: 249; and the anti-CFHR4 LCDR3 comprises the amino acid sequence of SEQ ID NO: 257. In some embodiments, the anti-CFHR4 LCDR1 comprises the amino acid sequence of SEQ ID NO: 242; the anti-CFHR4 LCDR2 comprises the amino acid sequence of SEQ ID NO: 250; and the anti-CFHR4 LCDR3 comprises the amino acid sequence of SEQ ID NO: 258. In some embodiments, the anti-CFHR4 LCDR1 comprises the amino acid sequence of SEQ ID NO: 243; the anti-CFHR4 LCDR2 comprises the amino acid sequence of SEQ ID NO: 251; and the anti-CFHR4 LCDR3 comprises the amino acid sequence of SEQ ID NO: 259.

[0019] In some embodiments, the anti-C3 HCDR1 comprises the amino acid sequence of SEQ ID NO: 583; the anti-C3 HCDR2 comprises the amino acid sequence of SEQ ID NO: 602; and the anti-C3 HCDR3 comprises the amino acid sequence of SEQ ID NO: 620. In some embodiments, the anti-C3 HCDR1 comprises the amino acid sequence of SEQ ID NO: 584; the anti-C3 HCDR2 comprises the amino acid sequence of SEQ ID NO: 603; and the anti-C3 HCDR3 comprises the amino acid sequence of SEQ ID NO: 621. In some embodiments, the anti-C3 HCDR1 comprises the amino acid sequence of SEQ ID NO: 585; the anti-C3 HCDR2 comprises the amino acid sequence of SEQ ID NO: 604; and the anti-C3 HCDR3 comprises the amino acid sequence of SEQ ID NO: 622. In some embodiments, the anti-C3 HCDR1 comprises the amino acid sequence of SEQ ID NO: 586; the anti-C3 HCDR2 comprises the amino acid sequence of SEQ ID NO: 605; and the anti-C3 HCDR3 comprises the amino acid sequence of SEQ ID NO: 623. In some embodiments, the anti-C3 HCDR1 comprises the amino acid sequence of SEQ ID NO: 587; the anti-C3 HCDR2 comprises the amino acid sequence of SEQ ID NO: 606; and the anti-C3 HCDR3 comprises the amino acid sequence of SEQ ID NO: 624. In some embodiments, the anti-C3 HCDR1 comprises the amino acid sequence of SEQ ID NO: 588; the anti-C3 HCDR2 comprises the amino acid sequence of SEQ ID NO: 607; and the anti-C3 HCDR3 comprises the amino acid sequence of SEQ ID NO: 625. In some embodiments, the anti-C3 HCDR1 comprises the amino acid sequence of SEQ ID NO: 589; the anti-C3 HCDR2 comprises the amino acid sequence of SEQ ID NO: 608; and the anti-C3 HCDR3 comprises the amino acid sequence of SEQ ID NO: 626. In some embodiments, the anti-C3 HCDR1 comprises the amino acid sequence of SEQ ID NO: 590; the anti-C3 HCDR2 comprises the amino acid sequence of SEQ ID NO: 609; and the anti-C3 HCDR3 comprises the amino acid sequence of SEQ ID NO: 627. In some embodiments, the anti-C3 HCDR1 comprises the amino acid sequence of SEQ ID NO: 591; the anti-C3 HCDR2 comprises the amino acid sequence of SEQ ID NO: 610; and the anti-C3 HCDR3 comprises the amino acid sequence of SEQ ID NO: 628. In some embodiments, the anti-C3 HCDR1 comprises the amino acid sequence of SEQ ID NO: 592; the anti-C3 HCDR2 comprises the amino acid sequence of SEQ ID NO: 611; and the anti-C3 HCDR3 comprises the amino acid sequence of SEQ ID NO: 629. In some embodiments, the anti-C3 HCDR1 comprises the amino acid sequence of SEQ ID NO: 593; the anti-C3 HCDR2 comprises the amino acid sequence of SEQ ID NO: 612; and the anti-C3 HCDR3 comprises the amino acid sequence of SEQ ID NO: 630. In some embodiments, the anti-C3 HCDR1 comprises the amino acid sequence of SEQ ID NO: 594; the anti-C3 HCDR2 comprises the amino acid sequence of SEQ ID NO: 613; and the anti-C3 HCDR3 comprises the amino acid sequence of SEQ ID NO: 631. In some embodiments, the anti-C3 HCDR1 comprises the amino acid sequence of SEQ ID NO: 595; the anti-C3 HCDR2 comprises the amino acid sequence of SEQ ID NO: 614; and the anti-C3 HCDR3 comprises the amino acid sequence of SEQ ID NO: 632. In some embodiments, the anti-C3 HCDR1 comprises the amino acid sequence of SEQ ID NO: 596; the anti-C3 HCDR2 comprises the amino acid sequence of SEQ ID NO: 615; and the anti-C3 HCDR3 comprises the amino acid sequence of SEQ ID NO: 633. In some embodiments, the anti-C3 HCDR1 comprises the amino acid sequence of SEQ ID NO: 597; the anti-C3 HCDR2 comprises the amino acid sequence of SEQ ID NO: 616; and the anti-C3 HCDR3 comprises the amino acid sequence of SEQ ID NO: 634. In some embodiments, the anti-C3 HCDR1 comprises the amino acid sequence of SEQ ID NO: 598; the anti-C3 HCDR2 comprises the amino acid sequence of SEQ ID NO: 617; and the anti-C3 HCDR3 comprises the amino acid sequence of SEQ ID NO: 635. In some embodiments, the anti-C3 HCDR1 comprises the amino acid sequence of SEQ ID NO: 599; the anti-C3 HCDR2 comprises the amino acid sequence of SEQ ID NO: 618; and the anti-C3 HCDR3 comprises the amino acid sequence of SEQ ID NO: 636. In some embodiments, the anti-C3 HCDR1 comprises the amino acid sequence of SEQ ID NO: 600; the anti-C3 HCDR2 comprises the amino acid sequence of SEQ ID NO: 619; and the anti-C3 HCDR3 comprises the amino acid sequence of SEQ ID NO: 637. In some embodiments, the anti-C3 HCDR1 comprises the amino acid sequence of SEQ ID NO: 639; the anti-C3 HCDR2 comprises the amino acid sequence of SEQ ID NO: 652; and the anti-C3 HCDR3 comprises the amino acid sequence of SEQ ID NO: 664. In some embodiments, the anti-C3 HCDR1 comprises the amino acid sequence of SEQ ID NO: 640; the anti-C3 HCDR2 comprises the amino acid sequence of SEQ ID NO: 653; and the anti-C3 HCDR3 comprises the amino acid sequence of SEQ ID NO: 665. In some embodiments, the anti-C3 HCDR1 comprises the amino acid sequence of SEQ ID NO: 641; the anti-C3 HCDR2 comprises the amino acid sequence of SEQ ID NO: 654; and the anti-C3 HCDR3 comprises the amino acid sequence of SEQ ID NO: 666. In some embodiments, the anti-C3 HCDR1 comprises the amino acid sequence of SEQ ID NO: 642; the anti-C3 HCDR2 comprises the amino acid sequence of SEQ ID NO: 655; and the anti-C3 HCDR3 comprises the amino acid sequence of SEQ ID NO: 667. In some embodiments, the anti-C3 HCDR1 comprises the amino acid sequence of SEQ ID NO: 643; the anti-C3 HCDR2 comprises the amino acid sequence of SEQ ID NO: 656; and the anti-C3 HCDR3 comprises the amino acid sequence of SEQ ID NO: 668. In some embodiments, the anti-C3 HCDR1 comprises the amino acid sequence of SEQ ID NO: 644; the anti-C3 HCDR2 comprises the amino acid sequence of SEQ ID NO: 657; and the anti-C3 HCDR3 comprises the amino acid sequence of SEQ ID NO: 669. In some embodiments, the anti-C3 HCDR1 comprises the amino acid sequence of SEQ ID NO: 645; the anti-C3 HCDR2 comprises the amino acid sequence of SEQ ID NO: 658; and the anti-C3 HCDR3 comprises the amino acid sequence of SEQ ID NO: 670. In some embodiments, the anti-C3 HCDR1 comprises the amino acid sequence of SEQ ID NO: 646; the anti-C3 HCDR2 comprises the amino acid sequence of SEQ ID NO: 659; and the anti-C3 HCDR3 comprises the amino acid sequence of SEQ ID NO: 671. In some embodiments, the anti-C3 HCDR1 comprises the amino acid sequence of SEQ ID NO: 647; the anti-C3 HCDR2 comprises the amino acid sequence of SEQ ID NO: 660; and the anti-C3 HCDR3 comprises the amino acid sequence of SEQ ID NO: 672. In some embodiments, the anti-C3 HCDR1 comprises the amino acid sequence of SEQ ID NO: 648; the anti-C3 HCDR2 comprises the amino acid sequence of SEQ ID NO: 661; and the anti-C3 HCDR3 comprises the amino acid sequence of SEQ ID NO: 673. In some embodiments, the anti-C3 HCDR1 comprises the amino acid sequence of SEQ ID NO: 649; the anti-C3 HCDR2 comprises the amino acid sequence of SEQ ID NO: 662; and the anti-C3 HCDR3 comprises the amino acid sequence of SEQ ID NO: 674. In some embodiments, the anti-C3 HCDR1 comprises the amino acid sequence of SEQ ID NO: 650; the anti-C3 HCDR2 comprises the amino acid sequence of SEQ ID NO: 663; and the anti-C3 HCDR3 comprises the amino acid sequence of SEQ ID NO: 675. In some embodiments, the anti-C3 HCDR1 comprises the amino acid sequence of SEQ ID NO: 677; the anti-C3 HCDR2 comprises the amino acid sequence of SEQ ID NO: 706; and the anti-C3 HCDR3 comprises the amino acid sequence of SEQ ID NO: 734. In some embodiments, the anti-C3 HCDR1 comprises the amino acid sequence of SEQ ID NO: 678; the anti-C3 HCDR2 comprises the amino acid sequence of SEQ ID NO: 707; and the anti-C3 HCDR3 comprises the amino acid sequence of SEQ ID NO: 735. In some embodiments, the anti-C3 HCDR1 comprises the amino acid sequence of SEQ ID NO: 679; the anti-C3 HCDR2 comprises the amino acid sequence of SEQ ID NO: 708; and the anti-C3 HCDR3 comprises the amino acid sequence of SEQ ID NO: 736. In some embodiments, the anti-C3 HCDR1 comprises the amino acid sequence of SEQ ID NO: 680; the anti-C3 HCDR2 comprises the amino acid sequence of SEQ ID NO: 709; and the anti-C3 HCDR3 comprises the amino acid sequence of SEQ ID NO: 737. In some embodiments, the anti-C3 HCDR1 comprises the amino acid sequence of SEQ ID NO: 681; the anti-C3 HCDR2 comprises the amino acid sequence of SEQ ID NO: 710; and the anti-C3 HCDR3 comprises the amino acid sequence of SEQ ID NO: 738. In some embodiments, the anti-C3 HCDR1 comprises the amino acid sequence of SEQ ID NO: 682; the anti-C3 HCDR2 comprises the amino acid sequence of SEQ ID NO: 711; and the anti-C3 HCDR3 comprises the amino acid sequence of SEQ ID NO: 739. In some embodiments, the anti-C3 HCDR1 comprises the amino acid sequence of SEQ ID NO: 683; the anti-C3 HCDR2 comprises the amino acid sequence of SEQ ID NO: 712; and the anti-C3 HCDR3 comprises the amino acid sequence of SEQ ID NO: 740. In some embodiments, the anti-C3 HCDR1 comprises the amino acid sequence of SEQ ID NO: 684; the anti-C3 HCDR2 comprises the amino acid sequence of SEQ ID NO: 713; and the anti-C3 HCDR3 comprises the amino acid sequence of SEQ ID NO: 741. In some embodiments, the anti-C3 HCDR1 comprises the amino acid sequence of SEQ ID NO: 685; the anti-C3 HCDR2 comprises the amino acid sequence of SEQ ID NO: 714; and the anti-C3 HCDR3 comprises the amino acid sequence of SEQ ID NO: 742. In some embodiments, the anti-C3 HCDR1 comprises the amino acid sequence of SEQ ID NO: 686; the anti-C3 HCDR2 comprises the amino acid sequence of SEQ ID NO: 715; and the anti-C3 HCDR3 comprises the amino acid sequence of SEQ ID NO: 743. In some embodiments, the anti-C3 HCDR1 comprises the amino acid sequence of SEQ ID NO: 687; the anti-C3 HCDR2 comprises the amino acid sequence of SEQ ID NO: 716; and the anti-C3 HCDR3 comprises the amino acid sequence of SEQ ID NO: 744. In some embodiments, the anti-C3 HCDR1 comprises the amino acid sequence of SEQ ID NO: 688; the anti-C3 HCDR2 comprises the amino acid sequence of SEQ ID NO: 717; and the anti-C3 HCDR3 comprises the amino acid sequence of SEQ ID NO: 745. In some embodiments, the anti-C3 HCDR1 comprises the amino acid sequence of SEQ ID NO: 689; the anti-C3 HCDR2 comprises the amino acid sequence of SEQ ID NO: 718; and the anti-C3 HCDR3 comprises the amino acid sequence of SEQ ID NO: 746. In some embodiments, the anti-C3 HCDR1 comprises the amino acid sequence of SEQ ID NO: 690; the anti-C3 HCDR2 comprises the amino acid sequence of SEQ ID NO: 719; and the anti-C3 HCDR3 comprises the amino acid sequence of SEQ ID NO: 747. In some embodiments, the anti-C3 HCDR1 comprises the amino acid sequence of SEQ ID NO: 691; the anti-C3 HCDR2 comprises the amino acid sequence of SEQ ID NO: 720; and the anti-C3 HCDR3 comprises the amino acid sequence of SEQ ID NO: 748. In some embodiments, the anti-C3 HCDR1 comprises the amino acid sequence of SEQ ID NO: 692; the anti-C3 HCDR2 comprises the amino acid sequence of SEQ ID NO: 721; and the anti-C3 HCDR3 comprises the amino acid sequence of SEQ ID NO: 749. In some embodiments, the anti-C3 HCDR1 comprises the amino acid sequence of SEQ ID NO: 693; the anti-C3 HCDR2 comprises the amino acid sequence of SEQ ID NO: 722; and the anti-C3 HCDR3 comprises the amino acid sequence of SEQ ID NO: 750. In some embodiments, the anti-C3 HCDR1 comprises the amino acid sequence of SEQ ID NO: 694; the anti-C3 HCDR2 comprises the amino acid sequence of SEQ ID NO: 723; and the anti-C3 HCDR3 comprises the amino acid sequence of SEQ ID NO: 751. In some embodiments, the anti-C3 HCDR1 comprises the amino acid sequence of SEQ ID NO: 695; the anti-C3 HCDR2 comprises the amino acid sequence of SEQ ID NO: 724; and the anti-C3 HCDR3 comprises the amino acid sequence of SEQ ID NO: 752. In some embodiments, the anti-C3 HCDR1 comprises the amino acid sequence of SEQ ID NO: 696; the anti-C3 HCDR2 comprises the amino acid sequence of SEQ ID NO: 725; and the anti-C3 HCDR3 comprises the amino acid sequence of SEQ ID NO: 753. In some embodiments, the anti-C3 HCDR1 comprises the amino acid sequence of SEQ ID NO: 697; the anti-C3 HCDR2 comprises the amino acid sequence of SEQ ID NO: 726; and the anti-C3 HCDR3 comprises the amino acid sequence of SEQ ID NO: 754. In some embodiments, the anti-C3 HCDR1 comprises the amino acid sequence of SEQ ID NO: 698; the anti-C3 HCDR2 comprises the amino acid sequence of SEQ ID NO: 727; and the anti-C3 HCDR3 comprises the amino acid sequence of SEQ ID NO: 755. In some embodiments, the anti-C3 HCDR1 comprises the amino acid sequence of SEQ ID NO: 699; the anti-C3 HCDR2 comprises the amino acid sequence of SEQ ID NO: 728; and the anti-C3 HCDR3 comprises the amino acid sequence of SEQ ID NO: 756. In some embodiments, the anti-C3 HCDR1 comprises the amino acid sequence of SEQ ID NO: 700; the anti-C3 HCDR2 comprises the amino acid sequence of SEQ ID NO: 729; and the anti-C3 HCDR3 comprises the amino acid sequence of SEQ ID NO: 757. In some embodiments, the anti-C3 HCDR1 comprises the amino acid sequence of SEQ ID NO: 701; the anti-C3 HCDR2 comprises the amino acid sequence of SEQ ID NO: 730; and the anti-C3 HCDR3 comprises the amino acid sequence of SEQ ID NO: 758. In some embodiments, the anti-C3 HCDR1 comprises the amino acid sequence of SEQ ID NO: 702; the anti-C3 HCDR2 comprises the amino acid sequence of SEQ ID NO: 731; and the anti-C3 HCDR3 comprises the amino acid sequence of SEQ ID NO: 759. In some embodiments, the anti-C3 HCDR1 comprises the amino acid sequence of SEQ ID NO: 703; the anti-C3 HCDR2 comprises the amino acid sequence of SEQ ID NO: 732; and the anti-C3 HCDR3 comprises the amino acid sequence of SEQ ID NO: 760. In some embodiments, the anti-C3 HCDR1 comprises the amino acid sequence of SEQ ID NO: 704; the anti-C3 HCDR2 comprises the amino acid sequence of SEQ ID NO: 733; and the anti-C3 HCDR3 comprises the amino acid sequence of SEQ ID NO: 761. In some embodiments, the anti-C3 HCDR1 comprises the amino acid sequence of SEQ ID NO: 763; the anti-C3 HCDR2 comprises the amino acid sequence of SEQ ID NO: 771; and the anti-C3 HCDR3 comprises the amino acid sequence of SEQ ID NO: 778. In some embodiments, the anti-C3 HCDR1 comprises the amino acid sequence of SEQ ID NO: 764; the anti-C3 HCDR2 comprises the amino acid sequence of SEQ ID NO: 772; and the anti-C3 HCDR3 comprises the amino acid sequence of SEQ ID NO: 779. In some embodiments, the anti-C3 HCDR1 comprises the amino acid sequence of SEQ ID NO: 765; the anti-C3 HCDR2 comprises the amino acid sequence of SEQ ID NO: 773; and the anti-C3 HCDR3 comprises the amino acid sequence of SEQ ID NO: 780. In some embodiments, the anti-C3 HCDR1 comprises the amino acid sequence of SEQ ID NO: 766; the anti-C3 HCDR2 comprises the amino acid sequence of SEQ ID NO: 774; and the anti-C3 HCDR3 comprises the amino acid sequence of SEQ ID NO: 781. In some embodiments, the anti-C3 HCDR1 comprises the amino acid sequence of SEQ ID NO: 767; the anti-C3 HCDR2 comprises the amino acid sequence of SEQ ID NO: 775; and the anti-C3 HCDR3 comprises the amino acid sequence of SEQ ID NO: 782. In some embodiments, the anti-C3 HCDR1 comprises the amino acid sequence of SEQ ID NO: 768; the anti-C3 HCDR2 comprises the amino acid sequence of SEQ ID NO: 776; and the anti-C3 HCDR3 comprises the amino acid sequence of SEQ ID NO: 783. In some embodiments, the anti-C3 HCDR1 comprises the amino acid sequence of SEQ ID NO: 769; the anti-C3 HCDR2 comprises the amino acid sequence of SEQ ID NO: 777; and the anti-C3 HCDR3 comprises the amino acid sequence of SEQ ID NO: 784. In some embodiments, the anti-C3 HCDR1 comprises the amino acid sequence of SEQ ID NO: 786; the anti-C3 HCDR2 comprises the amino acid sequence of SEQ ID NO: 794; and the anti-C3 HCDR3 comprises the amino acid sequence of SEQ ID NO: 801. In some embodiments, the anti-C3 HCDR1 comprises the amino acid sequence of SEQ ID NO: 787; the anti-C3 HCDR2 comprises the amino acid sequence of SEQ ID NO: 795; and the anti-C3 HCDR3 comprises the amino acid sequence of SEQ ID NO: 802. In some embodiments, the anti-C3 HCDR1 comprises the amino acid sequence of SEQ ID NO: 788; the anti-C3 HCDR2 comprises the amino acid sequence of SEQ ID NO: 796; and the anti-C3 HCDR3 comprises the amino acid sequence of SEQ ID NO: 803. In some embodiments, the anti-C3 HCDR1 comprises the amino acid sequence of SEQ ID NO: 789; the anti-C3 HCDR2 comprises the amino acid sequence of SEQ ID NO: 797; and the anti-C3 HCDR3 comprises the amino acid sequence of SEQ ID NO: 804. In some embodiments, the anti-C3 HCDR1 comprises the amino acid sequence of SEQ ID NO: 790; the anti-C3 HCDR2 comprises the amino acid sequence of SEQ ID NO: 798; and the anti-C3 HCDR3 comprises the amino acid sequence of SEQ ID NO: 805. In some embodiments, the anti-C3 HCDR1 comprises the amino acid sequence of SEQ ID NO: 791; the anti-C3 HCDR2 comprises the amino acid sequence of SEQ ID NO: 799; and the anti-C3 HCDR3 comprises the amino acid sequence of SEQ ID NO: 806. In some embodiments, the anti-C3 HCDR1 comprises the amino acid sequence of SEQ ID NO: 792; the anti-C3 HCDR2 comprises the amino acid sequence of SEQ ID NO: 800; and the anti-C3 HCDR3 comprises the amino acid sequence of SEQ ID NO: 807. In some embodiments, the anti-C3 HCDR1 comprises the amino acid sequence of SEQ ID NO: 809; the anti-C3 HCDR2 comprises the amino acid sequence of SEQ ID NO: 812; and the anti-C3 HCDR3 comprises the amino acid sequence of SEQ ID NO: 815. In some embodiments, the anti-C3 HCDR1 comprises the amino acid sequence of SEQ ID NO: 810; the anti-C3 HCDR2 comprises the amino acid sequence of SEQ ID NO: 813; and the anti-C3 HCDR3 comprises the amino acid sequence of SEQ ID NO: 816.

[0020] In some embodiments, the anti-C3 LCDR1 comprises the amino acid sequence of SEQ ID NO: 818; the anti-C3 LCDR2 comprises the amino acid sequence of SEQ ID NO: 850; and the anti-C3 LCDR3 comprises the amino acid sequence of SEQ ID NO: 881. In some embodiments, the anti-C3 LCDR1 comprises the amino acid sequence of SEQ ID NO: 819; the anti-C3 LCDR2 comprises the amino acid sequence of SEQ ID NO: 851; and the anti-C3 LCDR3 comprises the amino acid sequence of SEQ ID NO: 882. In some embodiments, the anti-C3 LCDR1 comprises the amino acid sequence of SEQ ID NO: 820; the anti-C3 LCDR2 comprises the amino acid sequence of SEQ ID NO: 852; and the anti-C3 LCDR3 comprises the amino acid sequence of SEQ ID NO: 883. In some embodiments, the anti-C3 LCDR1 comprises the amino acid sequence of SEQ ID NO: 821; the anti-C3 LCDR2 comprises the amino acid sequence of SEQ ID NO: 853; and the anti-C3 LCDR3 comprises the amino acid sequence of SEQ ID NO: 884. In some embodiments, the anti-C3 LCDR1 comprises the amino acid sequence of SEQ ID NO: 822; the anti-C3 LCDR2 comprises the amino acid sequence of SEQ ID NO: 854; and the anti-C3 LCDR3 comprises the amino acid sequence of SEQ ID NO: 885. In some embodiments, the anti-C3 LCDR1 comprises the amino acid sequence of SEQ ID NO: 823; the anti-C3 LCDR2 comprises the amino acid sequence of SEQ ID NO: 855; and the anti-C3 LCDR3 comprises the amino acid sequence of SEQ ID NO: 886. In some embodiments, the anti-C3 LCDR1 comprises the amino acid sequence of SEQ ID NO: 824; the anti-C3 LCDR2 comprises the amino acid sequence of SEQ ID NO: 856; and the anti-C3 LCDR3 comprises the amino acid sequence of SEQ ID NO: 887. In some embodiments, the anti-C3 LCDR1 comprises the amino acid sequence of SEQ ID NO: 825; the anti-C3 LCDR2 comprises the amino acid sequence of SEQ ID NO: 857; and the anti-C3 LCDR3 comprises the amino acid sequence of SEQ ID NO: 888. In some embodiments, the anti-C3 LCDR1 comprises the amino acid sequence of SEQ ID NO: 826; the anti-C3 LCDR2 comprises the amino acid sequence of SEQ ID NO: 858; and the anti-C3 LCDR3 comprises the amino acid sequence of SEQ ID NO: 889. In some embodiments, the anti-C3 LCDR1 comprises the amino acid sequence of SEQ ID NO: 827; the anti-C3 LCDR2 comprises the amino acid sequence of SEQ ID NO: 859; and the anti-C3 LCDR3 comprises the amino acid sequence of SEQ ID NO: 890. In some embodiments, the anti-C3 LCDR1 comprises the amino acid sequence of SEQ ID NO: 828; the anti-C3 LCDR2 comprises the amino acid sequence of SEQ ID NO: 860; and the anti-C3 LCDR3 comprises the amino acid sequence of SEQ ID NO: 891. In some embodiments, the anti-C3 LCDR1 comprises the amino acid sequence of SEQ ID NO: 829; the anti-C3 LCDR2 comprises the amino acid sequence of SEQ ID NO: 861; and the anti-C3 LCDR3 comprises the amino acid sequence of SEQ ID NO: 892. In some embodiments, the anti-C3 LCDR1 comprises the amino acid sequence of SEQ ID NO: 830; the anti-C3 LCDR2 comprises the amino acid sequence of SEQ ID NO: 862; and the anti-C3 LCDR3 comprises the amino acid sequence of SEQ ID NO: 893. In some embodiments, the anti-C3 LCDR1 comprises the amino acid sequence of SEQ ID NO: 831; the anti-C3 LCDR2 comprises the amino acid sequence of SEQ ID NO: 863; and the anti-C3 LCDR3 comprises the amino acid sequence of SEQ ID NO: 894. In some embodiments, the anti-C3 LCDR1 comprises the amino acid sequence of SEQ ID NO: 832; the anti-C3 LCDR2 comprises the amino acid sequence of SEQ ID NO: 864; and the anti-C3 LCDR3 comprises the amino acid sequence of SEQ ID NO: 895. In some embodiments, the anti-C3 LCDR1 comprises the amino acid sequence of SEQ ID NO: 833; the anti-C3 LCDR2 comprises the amino acid sequence of SEQ ID NO: 865; and the anti-C3 LCDR3 comprises the amino acid sequence of SEQ ID NO: 896. In some embodiments, the anti-C3 LCDR1 comprises the amino acid sequence of SEQ ID NO: 834; the anti-C3 LCDR2 comprises the amino acid sequence of SEQ ID NO: 866; and the anti-C3 LCDR3 comprises the amino acid sequence of SEQ ID NO: 897. In some embodiments, the anti-C3 LCDR1 comprises the amino acid sequence of SEQ ID NO: 835; the anti-C3 LCDR2 comprises the amino acid sequence of SEQ ID NO: 867; and the anti-C3 LCDR3 comprises the amino acid sequence of SEQ ID NO: 898. In some embodiments, the anti-C3 LCDR1 comprises the amino acid sequence of SEQ ID NO: 836; the anti-C3 LCDR2 comprises the amino acid sequence of SEQ ID NO: 868; and the anti-C3 LCDR3 comprises the amino acid sequence of SEQ ID NO: 899. In some embodiments, the anti-C3 LCDR1 comprises the amino acid sequence of SEQ ID NO: 837; the anti-C3 LCDR2 comprises the amino acid sequence of SEQ ID NO: 869; and the anti-C3 LCDR3 comprises the amino acid sequence of SEQ ID NO: 900. In some embodiments, the anti-C3 LCDR1 comprises the amino acid sequence of SEQ ID NO: 838; the anti-C3 LCDR2 comprises the amino acid sequence of SEQ ID NO: 870; and the anti-C3 LCDR3 comprises the amino acid sequence of SEQ ID NO: 901. In some embodiments, the anti-C3 LCDR1 comprises the amino acid sequence of SEQ ID NO: 839; the anti-C3 LCDR2 comprises the amino acid sequence of SEQ ID NO: 871; and the anti-C3 LCDR3 comprises the amino acid sequence of SEQ ID NO: 902. In some embodiments, the anti-C3 LCDR1 comprises the amino acid sequence of SEQ ID NO: 840; the anti-C3 LCDR2 comprises the amino acid sequence of SEQ ID NO: 872; and the anti-C3 LCDR3 comprises the amino acid sequence of SEQ ID NO: 903. In some embodiments, the anti-C3 LCDR1 comprises the amino acid sequence of SEQ ID NO: 841; the anti-C3 LCDR2 comprises the amino acid sequence of SEQ ID NO: 873; and the anti-C3 LCDR3 comprises the amino acid sequence of SEQ ID NO: 904. In some embodiments, the anti-C3 LCDR1 comprises the amino acid sequence of SEQ ID NO: 842; the anti-C3 LCDR2 comprises the amino acid sequence of SEQ ID NO: 874; and the anti-C3 LCDR3 comprises the amino acid sequence of SEQ ID NO: 905. In some embodiments, the anti-C3 LCDR1 comprises the amino acid sequence of SEQ ID NO: 843; the anti-C3 LCDR2 comprises the amino acid sequence of SEQ ID NO: 875; and the anti-C3 LCDR3 comprises the amino acid sequence of SEQ ID NO: 906. In some embodiments, the anti-C3 LCDR1 comprises the amino acid sequence of SEQ ID NO: 844; the anti-C3 LCDR2 comprises the amino acid sequence of SEQ ID NO: 876; and the anti-C3 LCDR3 comprises the amino acid sequence of SEQ ID NO: 907. In some embodiments, the anti-C3 LCDR1 comprises the amino acid sequence of SEQ ID NO: 845; the anti-C3 LCDR2 comprises the amino acid sequence of SEQ ID NO: 877; and the anti-C3 LCDR3 comprises the amino acid sequence of SEQ ID NO: 908. In some embodiments, the anti-C3 LCDR1 comprises the amino acid sequence of SEQ ID NO: 846; the anti-C3 LCDR2 comprises the amino acid sequence of SEQ ID NO: 878; and the anti-C3 LCDR3 comprises the amino acid sequence of SEQ ID NO: 909. In some embodiments, the anti-C3 LCDR1 comprises the amino acid sequence of SEQ ID NO: 847; the anti-C3 LCDR2 comprises the amino acid sequence of SEQ ID NO: 879; and the anti-C3 LCDR3 comprises the amino acid sequence of SEQ ID NO: 910. In some embodiments, the anti-C3 LCDR1 comprises the amino acid sequence of SEQ ID NO: 848; the anti-C3 LCDR2 comprises the amino acid sequence of SEQ ID NO: 880; and the anti-C3 LCDR3 comprises the amino acid sequence of SEQ ID NO: 911. In some embodiments, the anti-C3 LCDR1 comprises the amino acid sequence of SEQ ID NO: 913; the anti-C3 LCDR2 comprises the amino acid sequence of SEQ ID NO: 916; and the anti-C3 LCDR3 comprises the amino acid sequence of SEQ ID NO: 919. In some embodiments, the anti-C3 LCDR1 comprises the amino acid sequence of SEQ ID NO: 914; the anti-C3 LCDR2 comprises the amino acid sequence of SEQ ID NO: 917; and the anti-C3 LCDR3 comprises the amino acid sequence of SEQ ID NO: 920. In some embodiments, the anti-C3 LCDR1 comprises the amino acid sequence of SEQ ID NO: 914; the anti-C3 LCDR2 comprises the amino acid sequence of SEQ ID NO: 917; and the anti-C3 LCDR3 comprises the amino acid sequence of SEQ ID NO: 920. In some embodiments, the anti-C3 LCDR1 comprises the amino acid sequence of SEQ ID NO: 922; the anti-C3 LCDR2 comprises the amino acid sequence of SEQ ID NO: 931; and the anti-C3 LCDR3 comprises the amino acid sequence of SEQ ID NO: 940. In some embodiments, the anti-C3 LCDR1 comprises the amino acid sequence of SEQ ID NO: 923; the anti-C3 LCDR2 comprises the amino acid sequence of SEQ ID NO: 932; and the anti-C3 LCDR3 comprises the amino acid sequence of SEQ ID NO: 941. In some embodiments, the anti-C3 LCDR1 comprises the amino acid sequence of SEQ ID NO: 924; the anti-C3 LCDR2 comprises the amino acid sequence of SEQ ID NO: 933; and the anti-C3 LCDR3 comprises the amino acid sequence of SEQ ID NO: 942. In some embodiments, the anti-C3 LCDR1 comprises the amino acid sequence of SEQ ID NO: 925; the anti-C3 LCDR2 comprises the amino acid sequence of SEQ ID NO: 934; and the anti-C3 LCDR3 comprises the amino acid sequence of SEQ ID NO: 943. In some embodiments, the anti-C3 LCDR1 comprises the amino acid sequence of SEQ ID NO: 926; the anti-C3 LCDR2 comprises the amino acid sequence of SEQ ID NO: 935; and the anti-C3 LCDR3 comprises the amino acid sequence of SEQ ID NO: 944. In some embodiments, the anti-C3 LCDR1 comprises the amino acid sequence of SEQ ID NO: 927; the anti-C3 LCDR2 comprises the amino acid sequence of SEQ ID NO: 936; and the anti-C3 LCDR3 comprises the amino acid sequence of SEQ ID NO: 945. In some embodiments, the anti-C3 LCDR1 comprises the amino acid sequence of SEQ ID NO: 928; the anti-C3 LCDR2 comprises the amino acid sequence of SEQ ID NO: 937; and the anti-C3 LCDR3 comprises the amino acid sequence of SEQ ID NO: 946. In some embodiments, the anti-C3 LCDR1 comprises the amino acid sequence of SEQ ID NO: 929; the anti-C3 LCDR2 comprises the amino acid sequence of SEQ ID NO: 938; and the anti-C3 LCDR3 comprises the amino acid sequence of SEQ ID NO: 947. In some embodiments, the anti-C3 LCDR1 comprises the amino acid sequence of SEQ ID NO: 949; the anti-C3 LCDR2 comprises the amino acid sequence of SEQ ID NO: 984; and the anti-C3 LCDR3 comprises the amino acid sequence of SEQ ID NO: 1019. In some embodiments, the anti-C3 LCDR1 comprises the amino acid sequence of SEQ ID NO: 950; the anti-C3 LCDR2 comprises the amino acid sequence of SEQ ID NO: 985; and the anti-C3 LCDR3 comprises the amino acid sequence of SEQ ID NO: 1020. In some embodiments, the anti-C3 LCDR1 comprises the amino acid sequence of SEQ ID NO: 951; the anti-C3 LCDR2 comprises the amino acid sequence of SEQ ID NO: 986; and the anti-C3 LCDR3 comprises the amino acid sequence of SEQ ID NO: 1021. In some embodiments, the anti-C3 LCDR1 comprises the amino acid sequence of SEQ ID NO: 952; the anti-C3 LCDR2 comprises the amino acid sequence of SEQ ID NO: 987; and the anti-C3 LCDR3 comprises the amino acid sequence of SEQ ID NO: 1022. In some embodiments, the anti-C3 LCDR1 comprises the amino acid sequence of SEQ ID NO: 953; the anti-C3 LCDR2 comprises the amino acid sequence of SEQ ID NO: 988; and the anti-C3 LCDR3 comprises the amino acid sequence of SEQ ID NO: 1023. In some embodiments, the anti-C3 LCDR1 comprises the amino acid sequence of SEQ ID NO: 954; the anti-C3 LCDR2 comprises the amino acid sequence of SEQ ID NO: 989; and the anti-C3 LCDR3 comprises the amino acid sequence of SEQ ID NO: 1024. In some embodiments, the anti-C3 LCDR1 comprises the amino acid sequence of SEQ ID NO: 955; the anti-C3 LCDR2 comprises the amino acid sequence of SEQ ID NO: 990; and the anti-C3 LCDR3 comprises the amino acid sequence of SEQ ID NO: 1025. In some embodiments, the anti-C3 LCDR1 comprises the amino acid sequence of SEQ ID NO: 956; the anti-C3 LCDR2 comprises the amino acid sequence of SEQ ID NO: 991; and the anti-C3 LCDR3 comprises the amino acid sequence of SEQ ID NO: 1026. In some embodiments, the anti-C3 LCDR1 comprises the amino acid sequence of SEQ ID NO: 957; the anti-C3 LCDR2 comprises the amino acid sequence of SEQ ID NO: 992; and the anti-C3 LCDR3 comprises the amino acid sequence of SEQ ID NO: 1027. In some embodiments, the anti-C3 LCDR1 comprises the amino acid sequence of SEQ ID NO: 958; the anti-C3 LCDR2 comprises the amino acid sequence of SEQ ID NO: 993; and the anti-C3 LCDR3 comprises the amino acid sequence of SEQ ID NO: 1028. In some embodiments, the anti-C3 LCDR1 comprises the amino acid sequence of SEQ ID NO: 959; the anti-C3 LCDR2 comprises the amino acid sequence of SEQ ID NO: 994; and the anti-C3 LCDR3 comprises the amino acid sequence of SEQ ID NO: 1029. In some embodiments, the anti-C3 LCDR1 comprises the amino acid sequence of SEQ ID NO: 960; the anti-C3 LCDR2 comprises the amino acid sequence of SEQ ID NO: 995; and the anti-C3 LCDR3 comprises the amino acid sequence of SEQ ID NO: 1030. In some embodiments, the anti-C3 LCDR1 comprises the amino acid sequence of SEQ ID NO: 961; the anti-C3 LCDR2 comprises the amino acid sequence of SEQ ID NO: 996; and the anti-C3 LCDR3 comprises the amino acid sequence of SEQ ID NO: 1031. In some embodiments, the anti-C3 LCDR1 comprises the amino acid sequence of SEQ ID NO: 962; the anti-C3 LCDR2 comprises the amino acid sequence of SEQ ID NO: 997; and the anti-C3 LCDR3 comprises the amino acid sequence of SEQ ID NO: 1032. In some embodiments, the anti-C3 LCDR1 comprises the amino acid sequence of SEQ ID NO: 963; the anti-C3 LCDR2 comprises the amino acid sequence of SEQ ID NO: 998; and the anti-C3 LCDR3 comprises the amino acid sequence of SEQ ID NO: 1033. In some embodiments, the anti-C3 LCDR1 comprises the amino acid sequence of SEQ ID NO: 964; the anti-C3 LCDR2 comprises the amino acid sequence of SEQ ID NO: 999; and the anti-C3 LCDR3 comprises the amino acid sequence of SEQ ID NO: 1034. In some embodiments, the anti-C3 LCDR1 comprises the amino acid sequence of SEQ ID NO: 965; the anti-C3 LCDR2 comprises the amino acid sequence of SEQ ID NO: 1000; and the anti-C3 LCDR3 comprises the amino acid sequence of SEQ ID NO: 1035. In some embodiments, the anti-C3 LCDR1 comprises the amino acid sequence of SEQ ID NO: 966; the anti-C3 LCDR2 comprises the amino acid sequence of SEQ ID NO: 1001; and the anti-C3 LCDR3 comprises the amino acid sequence of SEQ ID NO: 1036. In some embodiments, the anti-C3 LCDR1 comprises the amino acid sequence of SEQ ID NO: 967; the anti-C3 LCDR2 comprises the amino acid sequence of SEQ ID NO: 1002; and the anti-C3 LCDR3 comprises the amino acid sequence of SEQ ID NO: 1037. In some embodiments, the anti-C3 LCDR1 comprises the amino acid sequence of SEQ ID NO: 968; the anti-C3 LCDR2 comprises the amino acid sequence of SEQ ID NO: 1003; and the anti-C3 LCDR3 comprises the amino acid sequence of SEQ ID NO: 1038. In some embodiments, the anti-C3 LCDR1 comprises the amino acid sequence of SEQ ID NO: 969; the anti-C3 LCDR2 comprises the amino acid sequence of SEQ ID NO: 1004; and the anti-C3 LCDR3 comprises the amino acid sequence of SEQ ID NO: 1039. In some embodiments, the anti-C3 LCDR1 comprises the amino acid sequence of SEQ ID NO: 970; the anti-C3 LCDR2 comprises the amino acid sequence of SEQ ID NO: 1005; and the anti-C3 LCDR3 comprises the amino acid sequence of SEQ ID NO: 1040. In some embodiments, the anti-C3 LCDR1 comprises the amino acid sequence of SEQ ID NO: 971; the anti-C3 LCDR2 comprises the amino acid sequence of SEQ ID NO: 1006; and the anti-C3 LCDR3 comprises the amino acid sequence of SEQ ID NO: 1041. In some embodiments, the anti-C3 LCDR1 comprises the amino acid sequence of SEQ ID NO: 972; the anti-C3 LCDR2 comprises the amino acid sequence of SEQ ID NO: 1007; and the anti-C3 LCDR3 comprises the amino acid sequence of SEQ ID NO: 1042. In some embodiments, the anti-C3 LCDR1 comprises the amino acid sequence of SEQ ID NO: 973; the anti-C3 LCDR2 comprises the amino acid sequence of SEQ ID NO: 1008; and the anti-C3 LCDR3 comprises the amino acid sequence of SEQ ID NO: 1043. In some embodiments, the anti-C3 LCDR1 comprises the amino acid sequence of SEQ ID NO: 974; the anti-C3 LCDR2 comprises the amino acid sequence of SEQ ID NO: 1009; and the anti-C3 LCDR3 comprises the amino acid sequence of SEQ ID NO: 1044. In some embodiments, the anti-C3 LCDR1 comprises the amino acid sequence of SEQ ID NO: 975; the anti-C3 LCDR2 comprises the amino acid sequence of SEQ ID NO: 1010; and the anti-C3 LCDR3 comprises the amino acid sequence of SEQ ID NO: 1045. In some embodiments, the anti-C3 LCDR1 comprises the amino acid sequence of SEQ ID NO: 976; the anti-C3 LCDR2 comprises the amino acid sequence of SEQ ID NO: 1011; and the anti-C3 LCDR3 comprises the amino acid sequence of SEQ ID NO: 1046. In some embodiments, the anti-C3 LCDR1 comprises the amino acid sequence of SEQ ID NO: 977; the anti-C3 LCDR2 comprises the amino acid sequence of SEQ ID NO: 1012; and the anti-C3 LCDR3 comprises the amino acid sequence of SEQ ID NO: 1047. In some embodiments, the anti-C3 LCDR1 comprises the amino acid sequence of SEQ ID NO: 978; the anti-C3 LCDR2 comprises the amino acid sequence of SEQ ID NO: 1013; and the anti-C3 LCDR3 comprises the amino acid sequence of SEQ ID NO: 1048. In some embodiments, the anti-C3 LCDR1 comprises the amino acid sequence of SEQ ID NO: 979; the anti-C3 LCDR2 comprises the amino acid sequence of SEQ ID NO: 1014; and the anti-C3 LCDR3 comprises the amino acid sequence of SEQ ID NO: 1049. In some embodiments, the anti-C3 LCDR1 comprises the amino acid sequence of SEQ ID NO: 980; the anti-C3 LCDR2 comprises the amino acid sequence of SEQ ID NO: 1015; and the anti-C3 LCDR3 comprises the amino acid sequence of SEQ ID NO: 1050. In some embodiments, the anti-C3 LCDR1 comprises the amino acid sequence of SEQ ID NO: 981; the anti-C3 LCDR2 comprises the amino acid sequence of SEQ ID NO: 1016; and the anti-C3 LCDR3 comprises the amino acid sequence of SEQ ID NO: 1051. In some embodiments, the anti-C3 LCDR1 comprises the amino acid sequence of SEQ ID NO: 982; the anti-C3 LCDR2 comprises the amino acid sequence of SEQ ID NO: 1017; and the anti-C3 LCDR3 comprises the amino acid sequence of SEQ ID NO: 1052.

[0021] In some embodiments, the anti-CFHR4 VH comprises an amino acid sequence having at least 90% sequence identity to at least one of SEQ ID NOs: 260-265, 284-293, 324-334, and 368-380. In some embodiments, the anti-CFHR4 VL comprises an amino acid sequence having at least 90% sequence identity to at least one of SEQ ID NOs: 272-277, 304-313, 346-356, and 394-406. In some embodiments, the anti-C3 VH comprises an amino acid sequence having at least 90% (e.g., at least 90%, 91%, 92%, 93%, 94%, 95%, 96%, 97%, 98%, 99%, or 100%) sequence identity to at least one of SEQ ID NOs: 1127-1200. In some embodiments, the anti-C3 VL comprises an amino acid sequence having at least 90% (e.g., at least 90%, 91%, 92%, 93%, 94%, 95%, 96%, 97%, 98%, 99%, or 100%) sequence identity to at least one of SEQ ID NOs: 1275-1348.

[0022] In some embodiments, the bispecific antibody binds CFHR4 and/or C3 and reduces complement activation. In some embodiments, the bispecific antibody binds CFHR4b and/or C3b and reduces complement activation. In some embodiments, the bispecific antibody binds human CFHR4 and/or C3 with a K_{D} of about 100 nM or lower.

[0023] In some embodiments, the bispecific antibody comprises a half-life extension moiety. In some embodiments, the half-life extension moiety comprises a polypeptide that is at least 20 amino acids in length and comprises any combination of G, A, S T, E, and P residues. In some embodiments, the half-life extension polypeptide is attached to the C-terminus or N-terminus of the antibody.

[0024] Embodiments of the present disclosure also include a pharmaceutical composition comprising any of the bispecific antibodies described herein. In some embodiments, the composition is suitable for ocular administration. In some embodiments, ocular administration comprises injection into vitreous fluid. In some embodiments, ocular administration comprises delivering the antibody using a conjunctival insert, a contact lens, a gel, a nanoparticle, a mucoadhesive polymer, an ointment, a solution, a suspension, eye drops, and/or an implant.

[0025] Embodiments of the present disclosure also include a method of treating age-related macular degeneration (AMD) comprising administering a pharmaceutical composition comprising an effective amount of any of the bispecific antibodies described herein to a subject in need thereof. In some embodiments, the pharmaceutical composition is administered ocularly and treats at least one AMD symptom. In some embodiments, AMD comprises wet AMD. In some embodiments, AMD comprises dry AMD. In some embodiments, the AMD symptom comprises visual distortion, reduced central vision, blurred vision, and/or difficulty adapting to low light. In some embodiments, administering the pharmaceutical composition reduces complement activation in the subject's eye. In some embodiments, the pharmaceutical composition is administered at a dose ranging from about 0.0001 mg/dose to about 100 mg/dose. In some embodiments, the pharmaceutical composition is administered at a dose ranging from about 0.0001 mg/ml to about 100 mg/ml.

### BRIEF DESCRIPTION OF THE DRAWING(S)

[0026] FIG. 1: Representative illustration of the molecular mechanism underlying treatment of advanced Age-related Macular Degeneration (AMD), including Geographic Atrophy (GA) with the anti-CFHR4 antibodies of the present disclosure.

[0027] FIG. 2: Representing results (see Table 1) plotting Odds Ratio and confidence intervals of haplotype effect when there is a deletion (tagged by one of two variants) or a pQTL variant on Y402 haplotype. The associations were done in relation to the reference haplotype at OR=1.

[0028] FIGS. 3A-3C: Representative ELISA results used to determine antigen positive serum titers of mice immunized with CFHR4, according to three different immunization protocols/cohorts (FIG. 3A—Cohort 1; FIG. 3B—Cohort 2; FIG. 3C—Cohort 3).

[0029] FIG. 4: Representative results of the thermal stabilities of the human CFHR4 monoclonal antibodies of the present disclosure (see Table 2, “ATX” antibodies). Thermal stability was assessed via differential scanning fluorimetry (DSF) utilizing the Protein Thermal Shift (PTS) assay.

[0030] FIGS. 5A-5B: Representative results of CFHR4 antibody cross-blocking experiments, including data from a representative heatmap analyzing the ability of the antibodies to block one another for binding to the antigen (FIG. 5A), and a representative network plot, which progressively groups antibodies with similar competition profiles.

[0031] FIG. 6: Representative results of CFHR4 antibody binding kinetics.

[0032] FIG. 7: Representative results of CFHR4 antibody cross-reactivity with Cynomolgus monkey CFHR4b protein (cCFHR4b).

[0033] FIG. 8: Representative results of CFHR4 antibody cross-reactivity with human CFHR4a protein.

[0034] FIG. 9: Representative results of CFHR4 antibody cross-reactivity with human CFHR3 protein.

[0035] FIG. 10: Representative results of CFHR4 antibody cross-reactivity with human CFHL-1 (Y402H) protein.

[0036] FIGS. 11A-11D: Representative schematic diagram of a C₃ convertase assembly assay used to evaluate the ability of the CFHR4 antibodies of the present disclosure to affect C3 convertase formation (FIG. 11A). FIG. 11B includes representative dose response curves for the top inhibitory CFHR4 antibodies, and FIG. 11C includes the IC50 values calculated for each antibody tested in FIG. 11B. FIG. 11D provides a representative summary of data demonstrating at least three functional classes of anti-CFHR4 antibodies.

[0037] FIGS. 12A-12D: Representative ELISA results used to determine antigen positive serum titers of mice immunized with human C3 and cyno C3, according to different immunization protocols/cohorts (Cohort 1: FIG. 12A (human C3) and FIG. 12B (cyno C3); Cohort 2: FIG. 12C (human C3); FIG. 12D (cyno C3)).

[0038] FIG. 13: Representing ELISA results of polyclonal phage pools to confirm enrichment and examine cross reactivity.

[0039] FIG. 14: Representative table containing binding kinetics of the C3 antibodies of the present disclosure.

[0040] FIG. 15: Representative table containing results of C3 antibody cross-reactivity with human C3b protein, Cynomolgus monkey C3 protein, and human C3a protein.

[0041] FIGS. 16A-16B: Representative tables containing binding kinetics of C3 antibodies with respect to human C3 protein (FIG. 16A) and human C3b protein (FIG. 16B).

[0042] FIGS. 17A-17D: Representative results of C3 antibody epitope experiments, including a table containing binning allocations (FIG. 17A), data from a representative heatmap analyzing the ability of the antibodies to block one another for binding to the antigen (FIG. 17B), and representative network plots (FIG. 17C and FIG. 17D), which progressively groups antibodies with similar competition profiles.

[0043] FIGS. 18A-18E: Representative binning network plots based on recombinant human affinities and cyno binding performed with C3b (FIG. 18A); C3b affinity and ligand blocking (FIG. 18B); bins vs. communities for CFHR4b blocking (FIG. 18C); bins vs. communities for CFH blocking (FIG. 18D); and material availability and common vs. diverse light chains (FIG. 18E).

[0044] FIG. 19: Representative results of C3 antibody polyreactivity with baculovirus particles (BVPs).

[0045] FIG. 20: Representative results of C3 antibody polyreactivity with the various proteins indicated.

[0046] FIGS. 21A-21B: Representative results of C3 antibody polyreactivity with CFHR4 (FIG. 21A) and CFH (FIG. 21B).

### DETAILED DESCRIPTION

[0047] Embodiments of the present disclosure relate to the treatment and/or prevention of age-related macular degeneration (AMD), including both neovascular AMD (“wet” AMD) and non-neovascular AMD (“dry” AMD), as well as advanced forms of non-neovascular AMD (geographic atrophy or GA). In particular, the present disclosure provides novel therapeutic bispecific antibodies that target components of the alternative pathway of the complement activation system.

[0048] The human complement system comprises a family of proteins that are essential to the human immune response against infections. Complement recognizes microbes or damaged host cells and subsequently triggers an enzymatic cascade that mainly serves to label target cells for phagocytosis by immune cells, produce chemoattractants, and directly kill target cells via pore formation. Unwanted complement activation on the body's own cells is a key pathological driver in a wide spectrum of immune diseases including autoimmune, inflammatory, and degenerative diseases. For current and future development of therapeutic complement inhibitors, knowledge of complement activation and how it can be regulated is of great importance.

[0049] Human complement factor H-related protein (CFHR) 4 belongs to the factor H family of plasma glycoproteins that are composed of short consensus repeat (SCR) domains. Although factor H is a well-known inhibitor of the alternative complement pathway, the functions of the CFHR proteins are not as clear. For example, CFHR4 lacks SCRs homologous to the complement inhibitory domains of factor H; however, its complement regulatory activities are not fully understood. Previous studies have shown that CFHR4 binds C-reactive protein via its most N-terminal SCR, which leads to classical complement pathway activation. CFHR4 binds C3b via its C terminus, but the significance of this interaction is not as well understood. Recent reports indicate that CFHR4 may serve as a platform for the assembly of an alternative pathway C3 convertase by binding C3b. This is at least partially based on the sustained ability of CFHR4-bound C3b to bind factor B and properdin, leading to an active convertase that generates C3a and C3b from C3. The CFHR4-C3bBb convertase is less sensitive to the factor H-mediated decay compared with the C3bBb convertase. CFHR4 mutants containing exchanges of conserved residues within the C-terminal C3b-binding site showed significantly reduced C3b binding and alternative pathway complement activation. These initial data suggest that, in contrast to the complement inhibitor factor H, CFHR4 acts as an enhancer of opsonization by promoting complement activation. CFHR4 is detected in human plasma as two different glycoproteins. The 86-kDa long isoform termed CFHR4A consists of nine SCRs. The ˜45-kDa shorter isoform termed CFHR4B is composed of five SCRs that represent SCR1 and SCR6-9 of CFHR4A. In CFHR4A, SCR1-4 and SCR5-8 are highly related based on nucleotide and amino acid sequence identity, likely as a result of an intramolecular duplication. Like all CFHRs, both CFHR4 isoforms lack SCRs homologous to the N-terminal complement inhibitory domains SCR1-4 of FH and CFHL1. In agreement with this, no significant cofactor and convertase decay accelerating activities have been reported for CFHR4B. The two most C-terminal domains of CFHR4A and CFHR4B are homologous to the C-terminal FH domains SCR19-20 that contain C3b/C3d-binding sites. CFHR4B has been shown to bind the C3d region of C3b via its C-terminal SCR4-5. However, except for a slight enhancement of the cofactor activity of FH in the presence of high CFHR4B concentrations, no significant functions have been associated with this C3b binding capacity. The CFHR4A isoform has not yet been characterized for its interaction with C3b and complement regulatory activity.

[0050] Convertase enzymes fulfill a central role in the complement cascade as they cleave C3 and C5, which mediate nearly all complement effector functions. C3 convertases cleave C3 into C3a, a chemoattractant molecule, and C3b, which covalently binds to target surfaces and triggers phagocytosis. C5 convertases cleave C5 into C5a, a potent mediator of leukocyte recruitment and inflammation, and C5b, the initiator of the membrane attack complex and cell lysis. The complement cascade begins via specific recognition of target cells in the classical (CP) and lectin (LP) pathways. In the CP, antibodies bind epitopes on the target cell and subsequently recruit the C1 complex (C1qr₂ₛ₂). Upon binding to the antibody platforms, C1q-associated protease C1s converts C4 and C2 to generate a C3 convertase enzyme (C4b2a) on the cell surface. Similarly, the lectin pathway also forms C4b2a via activation of mannose-binding lectin-associated serine proteases. The resulting CP/LP C4b2a convertases cleave C3 into C3a and C3b. Following cleavage, a reactive thioester in C3b is exposed, which enables its covalent attachment to target cell surfaces, leading to recognition of the cells by phagocytes. The labeling of target cells with C3b is amplified by the alternative pathway (AP) in which surface-bound C3b binds factor B (FB). The proconvertase C3bB is then cleaved by factor D (FD) to form an active C3 convertase complex that consists of C3b and the protease fragment Bb (C3bBb). Since the resulting active AP C3 convertase (C3bBb) is comprised of C3b itself, substrate cleavage results in generation of additional convertases, further propagating C3b deposition. When the density of C3b molecules on the cell surface becomes sufficiently high, the existing C3 convertases (C4b2a and C3bBb) gain the ability to cleave C5, leading to formation of C5a and C5b.

[0051] Age-related macular degeneration (AMD) is a progressive retinal disease in which the early stage is characterized by relatively few small drusen within the macula. When AMD progresses, drusen size and number increase, eventually leading towards more advanced stages of AMD. Two forms of advanced AMD are distinguished. The first form, neovascular AMD, is characterized by infiltration of abnormal blood vessels into the retina. These newly formed vessels are fragile and when they break, the leakage of blood constituents in the retina leads to sudden vision loss. The second form of advanced AMD, geographic atrophy (GA), is the result of gradual degeneration of the RPE and photoreceptors cells. Although neovascularization occurs in only 15-20% of AMD cases, it is responsible for the vast majority of vision loss caused by AMD. Drugs targeting vascular endothelial growth factor (VEGF), one of the central molecules in neovascularization, have proven to be very successful in neovascular AMD. However, no treatment is available for the remaining majority of early, intermediate or geographic atrophy AMD cases, and furthermore there are no effective means of preventing progression of early to advanced stages. Although it is known that AMD is the result of a complex interaction of environmental and genetic risk factors, studies into the molecular constituents of drusen suggest that AMD may have an immunological component. This suggestion arose after proteins involved in inflammation and/or other immune-associated responses, including components of the complement system, were found within drusen. Additionally, there are currently no treatments that address both wet and dry forms of AMD in a single biologic molecule.

[0052] In light of this, the embodiments of the present disclosure provide a therapeutic platform based on modulating different aspects of the complement activation pathway using bispecific antibodies targeting CFHR4 and C3. As described further herein, the bispecific antibodies of the present disclosure include an antigen binding site directed against CFHR4 and an antigen binding site directed against C3. Such antigen binding sites are described herein, and also in International PCT Appln. No. PCT/US2023/020351, and U.S. Provisional Patent Appln. Serial No. U.S. 63/462,638, both of which are incorporated herein by reference in their entireties and for all purposes.

### Definitions

[0053] To facilitate an understanding of the present technology, a number of terms and phrases are defined below. Additional definitions are set forth throughout the detailed description.

[0054] The use of the terms “a” and “an” and “the” and “at least one” and similar referents in the context of describing the embodiments of the present disclosure (especially in the context of the following claims) are to be construed to cover both the singular and the plural, unless otherwise indicated herein or clearly contradicted by context. The use of the term “at least one” followed by a list of one or more items (for example, “at least one of A and B”) is to be construed to mean one item selected from the listed items (A or B) or any combination of two or more of the listed items (A and B), unless otherwise indicated herein or clearly contradicted by context. The terms “comprising,” “having,” “including,” and “containing” are to be construed as open-ended terms (i.e., meaning “including, but not limited to,”) unless otherwise noted. Recitation of ranges of values herein are merely intended to serve as a shorthand method of referring individually to each separate value falling within the range, unless otherwise indicated herein, and each separate value is incorporated into the specification as if it were individually recited herein. All methods described herein can be performed in any suitable order unless otherwise indicated herein or otherwise clearly contradicted by context. The use of any and all examples, or exemplary language (e.g., “such as”) provided herein, is intended merely to better illuminate the various embodiments of the present disclosure, and does not pose a limitation on the scope of these embodiment unless otherwise claimed. No language in the specification should be construed as indicating any non-claimed element as essential to the practice of the various embodiments of the present disclosure.

[0055] As used herein, the term “or” is an inclusive “or” operator and is equivalent to the term “and/or” unless the context clearly dictates otherwise. The term “based on” is not exclusive and allows for being based on additional factors not described, unless the context clearly dictates otherwise. In addition, throughout the specification, the meaning of “a,” “an,” and “the” include plural references. The meaning of “in” includes “in” and “on.”

[0056] The transitional phrase “consisting essentially of” as used in claims in the present application limits the scope of a claim to the specified materials or steps “and those that do not materially affect the basic and novel characteristic(s)” of the claimed invention, as discussed in In re Herz, 537 F.2d 549, 551-52, 190 USPQ 461, 463 (CCPA 1976). For example, a composition “consisting essentially of” recited elements may contain an unrecited contaminant at a level such that, though present, the contaminant does not alter the function of the recited composition as compared to a pure composition, i.e., a composition “consisting of” the recited components.

[0057] The term “one or more,” as used herein, refers to a number higher than one. For example, the term “one or more” encompasses any of the following: two or more, three or more, four or more, five or more, six or more, seven or more, eight or more, nine or more, ten or more, eleven or more, twelve or more, thirteen or more, fourteen or more, fifteen or more, twenty or more, fifty or more, 100 or more, or an even greater number.

[0058] The term “one or more but less than a higher number,” “two or more but less than a higher number,” “three or more but less than a higher number,” “four or more but less than a higher number,” “five or more but less than a higher number,” “six or more but less than a higher number,” “seven or more but less than a higher number,” “eight or more but less than a higher number,” “nine or more but less than a higher number,” “ten or more but less than a higher number,” “eleven or more but less than a higher number,” “twelve or more but less than a higher number,” “thirteen or more but less than a higher number,” “fourteen or more but less than a higher number,” or “fifteen or more but less than a higher number” is not limited to a higher number. For example, the higher number can be 10,000, 1,000, 100, 50, etc. For example, the higher number can be approximately 50 (e.g., 50, 49, 48, 47, 46, 45, 44, 43, 42, 41, 40, 39, 38, 37, 36, 35, 34, 33, 32, 31, 32, 30, 29, 28, 27, 26, 25, 24, 23, 22, 21, 20, 19, 18, 17, 16, 15, 14, 13, 12, 11, 10, 9, 8, 7, 6, 5, 4, 3 or 2).

[0059] The term “immunoglobulin” or “antibody,” as used herein, refers to a protein that is found in blood or other bodily fluids of vertebrates, which is used by the immune system to identify and neutralize foreign objects, such as bacteria and viruses. Typically, an immunoglobulin or antibody is a protein that comprises at least one complementarity determining region (CDR). The CDRs form the “hypervariable region” of an antibody, which is responsible for antigen binding (discussed further below). A whole antibody typically consists of four polypeptides: two identical copies of a heavy (H) chain polypeptide and two identical copies of a light (L) chain polypeptide. Each of the heavy chains contains one N-terminal variable (V_{H}) region and three C-terminal constant (C_{H1}, C_{H2}, and C_{H3}) regions, and each light chain contains one N-terminal variable (V_{L}) region and one C-terminal constant (C_{L}) region. The light chains of antibodies can be assigned to one of two distinct types, either kappa (κ) or lambda (λ), based upon the amino acid sequences of their constant domains. In a typical antibody, each light chain is linked to a heavy chain by disulfide bonds, and the two heavy chains are linked to each other by disulfide bonds. The light chain variable region is aligned with the variable region of the heavy chain, and the light chain constant region is aligned with the first constant region of the heavy chain. The remaining constant regions of the heavy chains are aligned with each other.

[0060] The variable regions of each pair of light and heavy chains form the antigen binding site of an antibody. The V_{H} and V_{L} regions have the same general structure, with each region comprising four framework (FW or FR) regions. The term “framework region,” as used herein, refers to the relatively conserved amino acid sequences within the variable region which are located between the CDRs. There are four framework regions in each variable domain, which are designated FR1, FR2, FR3, and FR4. The framework regions form the β sheets that provide the structural framework of the variable region (see, e.g., C. A. Janeway et al. (eds.), Immunobiology, 5th Ed., Garland Publishing, New York, N.Y. (2001)).

[0061] The framework regions are connected by three CDRs. As discussed above, the three CDRs, known as CDR1, CDR2, and CDR3, form the “hypervariable region” of an antibody, which is responsible for antigen binding. The CDRs form loops connecting, and in some cases comprising part of, the beta-sheet structure formed by the framework regions. While the constant regions of the light and heavy chains are not directly involved in binding of the antibody to an antigen, the constant regions can influence the orientation of the variable regions. The constant regions also exhibit various effector functions, such as participation in antibody-dependent complement-mediated lysis or antibody-dependent cellular toxicity via interactions with effector molecules and cells.

[0062] As used herein, when an antibody or other entity (e.g., antigen binding domain) “specifically recognizes” or “specifically binds” an antigen or epitope, it preferentially recognizes the antigen in a complex mixture of proteins and/or macromolecules, and binds the antigen or epitope with affinity which is substantially higher than to other entities not displaying the antigen or epitope. In this regard, “affinity which is substantially higher” means affinity that is high enough to enable detection of an antigen or epitope which is distinguished from entities using a desired assay or measurement apparatus. Typically, it means binding affinity having a binding constant (Kₐ) of at least 10⁷ M⁻¹ (e.g., >10⁷ M⁻¹, >10⁸ M⁻¹, >10⁹ M⁻¹, >10¹⁰ M⁻¹, >10¹¹ M⁻¹, >10¹² M⁻¹, >10¹³ M⁻¹, etc.). In certain such embodiments, an antibody is capable of binding different antigens so long as the different antigens comprise that particular epitope. In certain instances, for example, homologous proteins from different species may comprise the same epitope.

[0063] The terms “fragment of an antibody,” “antibody fragment,” and “antigen-binding fragment” of an antibody are used interchangeably herein to refer to one or more fragments of an antibody that retain the ability to specifically bind to an antigen (see, generally, Holliger et al., Nat. Biotech., 23 (9): 1126-1129 (2005)). Any antigen-binding fragment of the antibody described herein is within the scope of the present disclosure. The antibody fragment desirably comprises, for example, one or more CDRs, the variable region (or portions thereof), the constant region (or portions thereof), or combinations thereof. Examples of antibody fragments include, but are not limited to, (i) a Fab fragment, which is a monovalent fragment consisting of the V_{L}, V_{H}, C_{L}, and CHI domains, (ii) a F(ab′)2 fragment, which is a bivalent fragment comprising two Fab fragments linked by a disulfide bridge at the hinge region, (iii) a Fv fragment consisting of the VL and VA domains of a single arm of an antibody, (iv) a Fab′ fragment, which results from breaking the disulfide bridge of an F(ab′)2 fragment using mild reducing conditions, (v) a disulfide-stabilized Fv fragment (dsFv), and (vi) a domain antibody (dAb), which is an antibody single variable region domain (V_{H} or V_{L}) polypeptide that specifically binds antigen.

[0064] The term “monoclonal antibody,” as used herein, refers to an antibody produced by a single clone of B lymphocytes that is directed against a single epitope on an antigen. Monoclonal antibodies typically are produced using hybridoma technology, as first described in Köhler and Milstein, Eur. J. Immunol., 5:511-519 (1976). Monoclonal antibodies may also be produced using recombinant DNA methods (see, e.g., U.S. Pat. No. 4,816,567), isolated from phage display antibody libraries (see, e.g., Clackson et al. Nature, 352:624-628 (1991); and Marks et al., J. Mol. Biol., 222:581-597 (1991)), or produced from transgenic mice carrying a fully human immunoglobulin system (see, e.g., Lonberg, Nat. Biotechnol., 23 (9): 1117-25 (2005), and Lonberg, Handb. Exp. Pharmacol., 181:69-97 (2008)). In contrast, “polyclonal” antibodies are antibodies that are secreted by different B cell lineages within an animal. Polyclonal antibodies are a collection of immunoglobulin molecules that recognize multiple epitopes on the same antigen.

[0065] The terms “peptide,” “polypeptide,” and “protein” are used interchangeably herein and refer to a polymeric form of amino acids of any length, which can include coded and non-coded amino acids, chemically or biochemically modified or derivatized amino acids, and polypeptides having modified peptide backbones.

[0066] The terms “nucleic acid,” “polynucleotide,” “nucleotide sequence,” and “oligonucleotide” are used interchangeably herein and refer to a polymer or oligomer of pyrimidine and/or purine bases, preferably cytosine, thymine, and uracil, and adenine and guanine, respectively (See Albert L. Lehninger, Principles of Biochemistry, at 793-800 (Worth Pub. 1982)). The terms encompass any deoxyribonucleotide, ribonucleotide, or peptide nucleic acid component, and any chemical variants thereof, such as methylated, hydroxymethylated, or glycosylated forms of these bases. The polymers or oligomers may be heterogenous or homogenous in composition, may be isolated from naturally occurring sources, or may be artificially or synthetically produced. In addition, the nucleic acids may be DNA or RNA, or a mixture thereof, and may exist permanently or transitionally in single-stranded or double-stranded form, including homoduplex, heteroduplex, and hybrid states. In some embodiments, a nucleic acid or nucleic acid sequence comprises other kinds of nucleic acid structures such as, for instance, a DNA/RNA helix, peptide nucleic acid (PNA), morpholino nucleic acid (see, e.g., Braasch and Corey, Biochemistry, 41 (14): 4503-4510 (2002) and U.S. Pat. No. 5,034,506), locked nucleic acid (LNA; see Wahlestedt et al., Proc. Natl. Acad. Sci. U.S.A., 97:5633-5638 (2000)), cyclohexenyl nucleic acids (see Wang, J. Am. Chem. Soc., 122:8595-8602 (2000)), and/or a ribozyme. The terms “nucleic acid” and “nucleic acid sequence” may also encompass a chain comprising non-natural nucleotides, modified nucleotides, and/or non-nucleotide building blocks that can exhibit the same function as natural nucleotides (e.g., “nucleotide analogs”).

[0067] The terms “complementary” and “complementarity” refer to nucleotides (e.g., 1 nucleotide) or polynucleotides (e.g., a sequence of nucleotides) related by the base-pairing rules. For example, the sequence 5′-A-G-T-3′ is complementary to the sequence 3′-T-C-A-5′. Complementarity may be “partial,” in which only some of the nucleic acids' bases are matched according to the base pairing rules. Or, there may be “complete” or “total” complementarity between the nucleic acids. The degree of complementarity between nucleic acid strands affects the efficiency and strength of hybridization between nucleic acid strands. This is of particular importance in amplification reactions and in detection methods that depend upon binding between nucleic acids.

[0068] The term “gene” refers to a nucleic acid (e.g., DNA or RNA) sequence that comprises coding sequences necessary for the production of an RNA, or of a polypeptide or its precursor. A functional polypeptide can be encoded by a full-length coding sequence or by any portion of the coding sequence as long as the desired activity or functional properties (e.g., enzymatic activity, ligand binding, signal transduction, etc.) of the polypeptide are retained. The term “portion” when used in reference to a gene refers to fragments of that gene. The fragments may range in size from a few nucleotides to the entire gene sequence minus one nucleotide. Thus, “a nucleotide comprising at least a portion of a “gene” may comprise fragments of the gene or the entire gene.

[0069] The term “gene” also encompasses the coding regions of a structural gene and includes sequences located adjacent to the coding region on both the 5′ and 3′ ends, e.g., for a distance of about 1 kb on either end, such that the gene corresponds to the length of the full-length mRNA (e.g., comprising coding, regulatory, structural and other sequences). The sequences that are located 5′ of the coding region and that are present on the mRNA are referred to as 5′ non-translated or untranslated sequences. The sequences that are located 3′ or downstream of the coding region and that are present on the mRNA are referred to as 3′ non-translated or 3′ untranslated sequences. The term “gene” encompasses both cDNA and genomic forms of a gene. In some organisms (e.g., eukaryotes), a genomic form or clone of a gene contains the coding region interrupted with non-coding sequences termed “introns” or “intervening regions” or “intervening sequences.” Introns are segments of a gene that are transcribed into nuclear RNA (hnRNA); introns may contain regulatory elements such as enhancers. Introns are removed or “spliced out” from the nuclear or primary transcript; introns therefore are absent in the messenger RNA (mRNA) transcript. The mRNA functions during translation to specify the sequence or order of amino acids in a nascent polypeptide.

[0070] In addition to containing introns, genomic forms of a gene may also include sequences located on both the 5′ and 3′ ends of the sequences that are present on the RNA transcript. These sequences are referred to as “flanking” sequences or regions (these flanking sequences are located S′ or 3′ to the non-translated sequences present on the mRNA transcript). The 5′ flanking region may contain regulatory sequences such as promoters and enhancers that control or influence the transcription of the gene. The 3′ flanking region may contain sequences that direct the termination of transcription, posttranscriptional cleavage, and polyadenylation.

[0071] The term “wild-type” when made in reference to a gene refers to a gene that has the characteristics of a gene isolated from a naturally occurring source. The term “wild-type” when made in reference to a gene product refers to a gene product that has the characteristics of a gene product isolated from a naturally occurring source. The term “wild-type” when made in reference to a protein refers to a protein that has the characteristics of a naturally occurring protein. The term “naturally-occurring” as applied to an object refers to the fact that an object can be found in nature. For example, a polypeptide or polynucleotide sequence that is present in an organism (including viruses) that can be isolated from a source in nature, and which has not been intentionally modified by the hand of a person in the laboratory is naturally-occurring. A wild-type gene is often that gene or allele that is most frequently observed in a population and is thus arbitrarily designated the “normal” or “wild-type” form of the gene. In contrast, the term “modified” or “mutant” when made in reference to a gene or to a gene product refers, respectively, to a gene or to a gene product that displays modifications in sequence and/or functional properties (e.g., altered characteristics) when compared to the wild-type gene or gene product. It is noted that naturally-occurring mutants can be isolated; these are identified by the fact that they have altered characteristics when compared to the wild-type gene or gene product.

[0072] The term “allele” refers to a variation of a gene; the variations include but are not limited to variants and mutants, polymorphic loci, and single nucleotide polymorphic loci, frameshift, and splice mutations. An allele may occur naturally in a population, or it might arise during the lifetime of any particular individual of the population.

[0073] Thus, the terms “variant” and “mutant” when used in reference to a nucleotide sequence refer to a nucleic acid sequence that differs by one or more nucleotides from another, usually related, nucleotide acid sequence. A “variation” is a difference between two different nucleotide sequences; typically, one sequence is a reference sequence.

[0074] Nucleic acid or amino acid sequence “identity,” as described herein, can be determined by comparing a nucleic acid or amino acid sequence of interest to a reference nucleic acid or amino acid sequence. A number of mathematical algorithms for obtaining the optimal alignment and calculating identity between two or more sequences are known and incorporated into a number of available software programs. Examples of such programs include CLUSTAL-W, T-Coffee, and ALIGN (for alignment of nucleic acid and amino acid sequences), BLAST programs (e.g., BLAST 2.1, BL2SEQ, and later versions thereof) and FASTA programs (e.g., FASTA3x, FAS™, and SSEARCH) (for sequence alignment and sequence similarity searches). Sequence alignment algorithms also are disclosed in, for example, Altschul et al., J. Molecular Biol., 215 (3): 403-410 (1990), Beigert et al., Proc. Natl. Acad. Sci. USA, 106 (10): 3770-3775 (2009), Durbin et al., eds., Biological Sequence Analysis: Probabilistic Models of Proteins and Nucleic Acids, Cambridge University Press, Cambridge, UK (2009), Soding, Bioinformatics, 21 (7): 951-960 (2005), Altschul et al., Nucleic Acids Res., 25 (17): 3389-3402 (1997), and Gusfield, Algorithms on Strings, Trees and Sequences, Cambridge University Press, Cambridge UK (1997)).

[0075] As would be recognized by one of ordinary skill in the art based on the present disclosure, one or more amino acids of the aforementioned bispecific antibodies, or antigen fragments thereof, can be replaced or substituted with a different amino acid. An amino acid “replacement” or “substitution” refers to the replacement of one amino acid at a given position or residue by another amino acid at the same position or residue within a polypeptide sequence. Amino acids are broadly grouped as “aromatic” or “aliphatic.” An aromatic amino acid includes an aromatic ring. Examples of “aromatic” amino acids include histidine (H or His), phenylalanine (F or Phe), tyrosine (Y or Tyr), and tryptophan (W or Trp). Non-aromatic amino acids are broadly grouped as “aliphatic.” Examples of “aliphatic” amino acids include glycine (G or Gly), alanine (A or Ala), valine (V or Val), leucine (L or Leu), isoleucine (I or Ile), methionine (M or Met), serine (S or Ser), threonine (T or Thr), cysteine (C or Cys), proline (P or Pro), glutamic acid (E or Glu), aspartic acid (A or Asp), asparagine (N or Asn), glutamine (Q or Gln), lysine (K or Lys), and arginine (R or Arg). Aliphatic amino acids may be sub-divided into four sub-groups. The “large aliphatic non-polar sub-group” consists of valine, leucine, and isoleucine. The “aliphatic slightly-polar sub-group” consists of methionine, serine, threonine, and cysteine. The “aliphatic polar/charged sub-group” consists of glutamic acid, aspartic acid, asparagine, glutamine, lysine, and arginine. The “small-residue sub-group” consists of glycine and alanine. The group of charged/polar amino acids may be sub-divided into three sub-groups: the “positively-charged sub-group” consisting of lysine and arginine, the “negatively-charged sub-group” consisting of glutamic acid and aspartic acid, and the “polar sub-group” consisting of asparagine and glutamine. Aromatic amino acids may be sub-divided into two sub-groups: the “nitrogen ring sub-group” consisting of histidine and tryptophan and the “phenyl sub-group” consisting of phenylalanine and tyrosine.

[0076] The amino acid replacement or substitution can be conservative, semi-conservative, or non-conservative. The phrase “conservative amino acid substitution” or “conservative mutation” refers to the replacement of one amino acid by another amino acid with a common property. A functional way to define common properties between individual amino acids is to analyze the normalized frequencies of amino acid changes between corresponding proteins of homologous organisms (Schulz and Schirmer, Principles of Protein Structure, Springer-Verlag, New York (1979)). According to such analyses, groups of amino acids may be defined where amino acids within a group exchange preferentially with each other, and therefore resemble each other most in their impact on the overall protein structure. Examples of conservative amino acid substitutions include substitutions of amino acids within the sub-groups described above, for example, lysine for arginine and vice versa such that a positive charge may be maintained, glutamic acid for aspartic acid and vice versa such that a negative charge may be maintained, serine for threonine such that a free —OH can be maintained, and glutamine for asparagine such that a free —NH₂ can be maintained. “Semi-conservative mutations” include amino acid substitutions of amino acids within the same groups listed above, but not within the same sub-group. For example, the substitution of aspartic acid for asparagine, or asparagine for lysine, involves amino acids within the same group, but different sub-groups. “Non-conservative mutations” involve amino acid substitutions between different groups, for example, lysine for tryptophan, or phenylalanine for serine, etc.

[0077] In addition, one or more amino acids can be inserted into the bispecific antibodies of the present disclosure (e.g., insertion into the heavy and/or light chain variable region amino acid sequence). Any number of suitable amino acids can be inserted into the amino acid sequence of the antibody or antigen-binding fragment thereof. In this respect, at least one amino acid (e.g., 2 or more, 5 or more, or 10 or more amino acids), but not more than 20 amino acids (e.g., 18 or less, 15 or less, or 12 or less amino acids), can be inserted into the amino acid sequence of the antibody or antigen-binding fragment thereof. For example, 1-10 amino acids (e.g., 1, 2, 3, 4, 5, 6, 7, 8, 9, or 10 amino acids) may be inserted into the amino acid sequence of the monoclonal antibody or antigen-binding fragment thereof. In this respect, the amino acid(s) can be inserted into an antibody or antigen-binding fragment thereof in any suitable location. Preferably, the amino acid(s) are inserted into a CDR (e.g., CDR1, CDR2, or CDR3) of the antibody or antigen-binding fragment thereof.

[0078] The terms “immunogen” and “antigen” are used interchangeably herein and refer to any molecule, compound, or substance that induces an immune response in an animal (e.g., a mammal). An “immune response” can entail, for example, antibody production and/or the activation of immune effector cells. An antigen in the context of the disclosure can comprise any subunit, fragment, or epitope of any proteinaceous or non-proteinaceous (e.g., carbohydrate or lipid) molecule that provokes an immune response in a mammal. The term “epitope” refers to a sequence of an antigen that is recognized by an antibody or an antigen receptor. Epitopes also are referred to in the art as “antigenic determinants.” In certain embodiments, an epitope is a region of an antigen that is specifically bound by an antibody. In certain embodiments, an epitope may include chemically active surface groupings of molecules such as amino acids, sugar side chains, phosphoryl, or sulfonyl groups. In certain embodiments, an epitope may have specific three-dimensional structural characteristics (e.g., a “conformational” epitope) and/or specific charge characteristics. The antigen can be a protein or peptide of viral, bacterial, parasitic, fungal, protozoan, prion, cellular, or extracellular origin, which provokes an immune response in a mammal, preferably leading to protective immunity.

[0079] A “pharmaceutically acceptable carrier” as used herein generally refers to an ingredient in a pharmaceutical formulation, other than an active ingredient, which is nontoxic to a subject. A pharmaceutically acceptable carrier includes, but is not limited to, a buffer, excipient, stabilizer, or preservative.

[0080] The term “pharmaceutical formulation” as used herein generally refers to a preparation which is in such form as to permit the biological activity of an active ingredient (e.g., bispecific antibodies of the present disclosure) contained therein to be effective, and which contains no additional components which are unacceptably toxic to a subject to which the formulation would be administered.

[0081] As used herein, “treatment” (and grammatical variations thereof such as “treat” or “treating”) generally refers to clinical intervention in an attempt to alter the natural course of the individual being treated, and can be performed either for prophylaxis or during the course of clinical pathology. Desirable effects of treatment include, but are not limited to, preventing occurrence or recurrence of disease, alleviation of symptoms, diminishment of any direct or indirect pathological consequences of the disease, preventing metastasis, decreasing the rate of disease progression, amelioration or palliation of the disease state, and remission or improved prognosis. In some embodiments, bispecific antibodies of the present disclosure or other compositions that include a bispecific antibody of the present disclosure (e.g., an antibody conjugate, a fusion protein, or a polymeric formulation) are used to delay development of a disease or to slow the progression of a disease.

[0082] The term “half-life” as used herein generally refers to the time required for the concentration of a substance (e.g., a bispecific antibody, an antibody conjugate, a fusion protein (e.g., a Fab fusion protein), or a polymeric formulation) to decrease by one-half, in vivo (e.g., in the eye (e.g., the vitreous)) or in vitro.

[0083] An “effective amount” of an agent, e.g., a pharmaceutical formulation, as used herein generally refers to an amount effective, at dosages and for periods of time necessary, to achieve the desired therapeutic or prophylactic result.

[0084] An “individual” or “subject” is a mammal. Mammals include, but are not limited to, domesticated animals (e.g., cows, sheep, cats, dogs, and horses), primates (e.g., humans and non-human primates such as monkeys), rabbits, and rodents (e.g., mice and rats). In certain embodiments, the individual or subject is a human. A “subject” may be a “patient.”

### Anti-CFHR4/Anti-C3 Bispecific Antibodies

[0085] As described further herein, embodiments of the present disclosure relate to the treatment and/or prevention of age-related macular degeneration (AMD), including both neovascular AMD (“wet” AMD) and non-neovascular AMD (“dry” AMD), as well as advanced forms of non-neovascular AMD (geographic atrophy or GA). In particular, the present disclosure provides novel therapeutic bispecific antibodies that target components of the alternative pathway of the complement activation system to treat AMD. As described further herein, anti-CFHR4 antibodies and anti-C3 were generated, and their structural and functional properties were elucidated. Based on these data, corresponding bispecific antibodies were generated in which one antigen-binding site is directed against CFHR4 and the other antigen-binding site is directed against C3.

[0086] In accordance with these embodiments, the present disclosure provides a bispecific antibody, or an antigen binding fragment thereof, which specifically binds human Complement Factor H Related 4 (CFHR) and/or human Complement Component 3 (C3). In some embodiments, the human CFHR4 is the CFHR4 b variant (CFHR4b), which is optionally a polypeptide comprising or consisting of the amino acid sequence of SEQ ID NO: 580. As such, the bispecific antibodies of the present disclosure are capable of binding CFHR4 and/or CFHR4B polypeptides and proteins. In some embodiments, the human C3 is the b variant of C3 (C3b), which is optionally a polypeptide comprising or consisting of the amino acid sequence of SEQ ID NO: 1645. As such, the bispecific antibodies of the present disclosure are capable of binding Complement Component 3 (C3), Complement Component 3a (C3a), and/or Complement Component 3b (C3b) polypeptides and proteins.

[0087] In some embodiments, the bispecific antibody or fragment thereof is monoclonal, optionally recombinant. In some embodiments, the bispecific antibody or fragment thereof is human, humanized, or chimeric. In some embodiments, the bispecific antibody or fragment thereof is a full length antibody, a single chain antibody, a single chain variable fragment (scFv), a variable fragment (Fv), a fragment antigen-binding region (Fab), a Fab-C, a Fab′-SH, a (Fab′)2, a single-domain antibody (sdAb), a VHH antibody, a nanobody, a camelid-derived single-domain antibody, a shark IgNAR-derived single-domain antibody fragment (VNAR), a diabody, a triabody, an anticalin or an aptamer, optionally wherein the antibody is a full length antibody comprising an Fc region such as a human IgG1, IgG2, IgG3 or IgG4 region.

[0088] In some embodiments, the bispecific antibody or fragment thereof is conjugated to at least one additional moiety, optionally selected from: an antigen binding moiety, such as an antibody or antigen-binding fragment thereof, which is capable of specific binding to a target which is not human CFHR4 or human C3, preferably wherein said target is expressed in the human eye; a therapeutic or cytotoxic moiety; a detection moiety; a purification moiety; a half-life extension moiety, optionally a polypeptide that is at least 20 amino acids in length and comprises any combination of G, A, S T, E, and P residue, which polypeptide is conjugated to the C- or N-terminus of the antibody.

[0089] In some embodiments, the bispecific antibody or fragment thereof is a polypeptide comprising: one, two or all three HCDRs of any one of the exemplary CFHR4 antibodies the sequences of which are provided in Table 3; and one, two or all three of the corresponding LCDRs of said exemplary antibody; and/or a VH sequence having at least 90% identity to the VH sequence of any one of the exemplary CFHR4 antibodies the sequences of which are provided in Table 4; and optionally a VL sequence having at least 90% identity to the corresponding VL sequence of said exemplary antibody, preferably wherein variation is not permitted in the HCDRs or LCDRs; and/or all six CDRs of any one of the exemplary CFHR4 antibodies the sequences of which are provided in Table 3; the VH and VL sequences of any one of the exemplary CFHR4 antibodies the sequences of which are provided in Table 4; and/or the full length heavy chain (VH+constant) sequence of any one of the exemplary CFHR4 antibodies the sequences of which are provided in Table 5; and optionally the corresponding full length light chain (VL+constant) sequence of said exemplary antibody.

[0090] In some embodiments, the bispecific antibody or fragment thereof is a polypeptide comprising: one, two or all three HCDRs of any one of the exemplary C3 antibodies the sequences of which are provided in Table 6; and one, two or all three of the corresponding LCDRs of said exemplary antibody; and/or a VH sequence having at least 90% identity to the VH sequence of any one of the exemplary C3 antibodies the sequences of which are provided in Table 7; and optionally a VL sequence having at least 90% identity to the corresponding VL sequence of said exemplary antibody provided in Table 8, preferably wherein variation is not permitted in the HCDRs or LCDRs; and/or all six CDRs of any one of the exemplary C3 antibodies the sequences of which are provided in Table 6; the VH and VL sequences of any one of the exemplary C3 antibodies the sequences of which are provided in Tables 7 and 8; and/or the full length heavy chain (VH+constant) sequence of any one of the exemplary C3 antibodies the sequences of which are provided in Table 9; and optionally the corresponding full length light chain (VL+constant) sequence of said exemplary antibody provided in Table 10.

[0091] Embodiments of the present disclosure also include a polynucleotide encoding the bispecific antibody or fragment thereof. In some embodiments, the polynucleotide comprises or consists of a nucleic acid sequence having at least 70%, 80%, 90%, or 100% identity to a nucleic acid sequence of any one of the exemplary antibodies the sequences of which are provided in Tables 5, 9, and 10. Embodiments of the present disclosure also include an expression vector comprising the polynucleotide, which is optionally an adeno-associated virus (AAV) vector, a lentiviral (LV) vector, a herpes simplex virus (HSV) vector, or a retrovirus vector.

[0092] Embodiments of the present disclosure also include a pharmaceutical composition comprising the bispecific antibody or fragment thereof, the corresponding polynucleotide, or the vector comprising the polynucleotide. In some embodiments, the composition comprises at least one pharmaceutically acceptable carrier, diluent or preservative; and/or at least one additional active ingredient. In some embodiments, the pharmaceutical composition is suitable for ocular administration to a subject, optionally by delivery using a conjunctival insert, a contact lens, a gel, a nanoparticle, a mucoadhesive polymer, an ointment, a solution, a suspension, eye drops, and/or an implant, preferably by injection into the vitreous fluid.

[0093] Embodiments of the present disclosure also include the bispecific antibody or fragment thereof, the corresponding polynucleotide, the vector comprising the polynucleotide, or the pharmaceutical composition, for use as a medicament, optionally for use in a method of treating a disease of the eye in a subject. In some embodiments, the disease is characterized by increased activation of the complement system, in particular the alternative pathway, and in particular within the eye of the subject, for example in drusen or retinal pigment epithelium (RPE) cells of the subject. In some embodiments, the method comprises ocular administration of the antibody, preferably by injection into the vitreous fluid, and said administration preferably relieves at least one symptom in the subject selected from visual distortion, reduced central vision, blurred vision, and/or difficulty adapting to low light. In some embodiments, the disease is age-related macular degeneration (AMD), including dry AMD, which may be at an early, intermediate or advanced stage (the latter otherwise known as geographic atrophy, GA).

[0094] In accordance with the above, embodiments of the present disclosure include a bispecific antibody comprising a first antigen-binding site directed against Complement Factor H Related 4 (CFHR4) and a second antigen-binding site directed against Complement Component 3 (C3). In some embodiments, the first anti-CFHR4 antigen-binding site comprises a heavy chain variable region (VH) comprising complementarity determining regions (CDRs) HCDR1, HCDR2, and HCDR3 from at least one of SEQ ID NOs: 260-265, 284-293, 324-334, and 368-380; and a light chain variable region (VL) comprising complementarity determining regions (CDRs) LCDR1, LCDR2, and LCDR3 from at least one of SEQ ID NOs: 272-277, 304-313, 346-356, and 394-406; and the second anti-C3 antigen-binding site comprises a heavy chain variable region (VH) comprising complementarity determining regions (CDRs) HCDR1, HCDR2, and HCDR3; and a light chain variable region (VL) comprising complementarity determining regions (CDRs) LCDR1, LCDR2, and LCDR3.

[0095] Embodiments of the present disclosure include a bispecific antibody comprising a first antigen-binding site directed against Complement Factor H Related 4 (CFHR4) and a second antigen-binding site directed against Complement Component 3 (C3). In some embodiments, the first anti-CFHR4 antigen-binding site comprises a heavy chain variable region (VH) comprising complementarity determining regions (CDRs) HCDR1, HCDR2, and HCDR3; and a light chain variable region (VL) comprising complementarity determining regions (CDRs) LCDR1, LCDR2, and LCDR3; and the second anti-C3 antigen-binding site comprises a heavy chain variable region (VH) comprising complementarity determining regions (CDRs) HCDR1, HCDR2, and HCDR3 from at least one of SEQ ID NOs: 1127-1200; and a light chain variable region (VL) comprising complementarity determining regions (CDRs) LCDR1, LCDR2, and LCDR3 from at least one of SEQ ID NOs: 1275-1348.

[0096] Embodiments of the present disclosure include a bispecific antibody comprising a first antigen-binding site directed against Complement Factor H Related 4 (CFHR4) and a second antigen-binding site directed against Complement Component 3 (C3). In some embodiments, the first anti-CFHR4 antigen-binding site comprises a heavy chain variable region (VH) comprising complementarity determining regions (CDRs) HCDR1, HCDR2, and HCDR3 from at least one of SEQ ID NOs: 260-265, 284-293, 324-334, and 368-380; and a light chain variable region (VL) comprising complementarity determining regions (CDRs) LCDR1, LCDR2, and LCDR3 from at least one of SEQ ID NOs: 272-277, 304-313, 346-356, and 394-406; and the second anti-C3 antigen-binding site comprises a heavy chain variable region (VH) comprising complementarity determining regions (CDRs) HCDR1, HCDR2, and HCDR3 from at least one of SEQ ID NOs: 1127-1200; and a light chain variable region (VL) comprising complementarity determining regions (CDRs) LCDR1, LCDR2, and LCDR3 from at least one of SEQ ID NOs: 1275-1348.

[0097] In some embodiments, the bispecific antibodies of the present disclosure comprise an anti-CFHR4 VH that comprises an amino acid sequence having at least 90% sequence identity to at least one of SEQ ID NOs: 260-265, 284-293, 324-334, and 368-380. In some embodiments, the bispecific antibodies of the present disclosure comprise an anti-CFHR4 VL that comprises an amino acid sequence having at least 90% sequence identity to at least one of SEQ ID NOs: 272-277, 304-313, 346-356, and 394-406.

[0098] In accordance with these embodiments, the anti-CFHR4 HCDR1 comprises the amino acid sequence of SEQ ID NO: 2; the anti-CFHR4 HCDR2 comprises the amino acid sequence of SEQ ID NO: 9; and the anti-CFHR4 HCDR3 comprises the amino acid sequence of SEQ ID NO: 15. In some embodiments, the anti-CFHR4 HCDR1 comprises the amino acid sequence of SEQ ID NO: 3; the anti-CFHR4 HCDR2 comprises the amino acid sequence of SEQ ID NO: 10; and the anti-CFHR4 HCDR3 comprises the amino acid sequence of SEQ ID NO: 16. In some embodiments, the anti-CFHR4 HCDR1 comprises the amino acid sequence of SEQ ID NO: 4; the anti-CFHR4 HCDR2 comprises the amino acid sequence of SEQ ID NO: 11; and the anti-CFHR4 HCDR3 comprises the amino acid sequence of SEQ ID NO: 17. In some embodiments, the anti-CFHR4 HCDR1 comprises the amino acid sequence of SEQ ID NO: 5; the anti-CFHR4 HCDR2 comprises the amino acid sequence of SEQ ID NO: 12; and the anti-CFHR4 HCDR3 comprises the amino acid sequence of SEQ ID NO: 18. In some embodiments, the anti-CFHR4 HCDR1 comprises the amino acid sequence of SEQ ID NO: 6; the anti-CFHR4 HCDR2 comprises the amino acid sequence of SEQ ID NO: 13; and the anti-CFHR4 HCDR3 comprises the amino acid sequence of SEQ ID NO: 19. In some embodiments, the anti-CFHR4 HCDR1 comprises the amino acid sequence of SEQ ID NO: 7; the anti-CFHR4 HCDR2 comprises the amino acid sequence of SEQ ID NO: 14; and the anti-CFHR4 HCDR3 comprises the amino acid sequence of SEQ ID NO: 20. In some embodiments, the anti-CFHR4 HCDR1 comprises the amino acid sequence of SEQ ID NO: 22; the anti-CFHR4 HCDR2 comprises the amino acid sequence of SEQ ID NO: 33; and the anti-CFHR4 HCDR3 comprises the amino acid sequence of SEQ ID NO: 43. In some embodiments, the anti-CFHR4 HCDR1 comprises the amino acid sequence of SEQ ID NO: 23; the anti-CFHR4 HCDR2 comprises the amino acid sequence of SEQ ID NO: 34; and the anti-CFHR4 HCDR3 comprises the amino acid sequence of SEQ ID NO: 44. In some embodiments, the anti-CFHR4 HCDR1 comprises the amino acid sequence of SEQ ID NO: 24; the anti-CFHR4 HCDR2 comprises the amino acid sequence of SEQ ID NO: 35; and the anti-CFHR4 HCDR3 comprises the amino acid sequence of SEQ ID NO: 45. In some embodiments, the anti-CFHR4 HCDR1 comprises the amino acid sequence of SEQ ID NO: 25; the anti-CFHR4 HCDR2 comprises the amino acid sequence of SEQ ID NO: 36; and the anti-CFHR4 HCDR3 comprises the amino acid sequence of SEQ ID NO: 46. In some embodiments, the anti-CFHR4 HCDR1 comprises the amino acid sequence of SEQ ID NO: 26; the anti-CFHR4 HCDR2 comprises the amino acid sequence of SEQ ID NO: 37; and the anti-CFHR4 HCDR3 comprises the amino acid sequence of SEQ ID NO: 47. In some embodiments, the anti-CFHR4 HCDR1 comprises the amino acid sequence of SEQ ID NO: 27; the anti-CFHR4 HCDR2 comprises the amino acid sequence of SEQ ID NO: 38; and the anti-CFHR4 HCDR3 comprises the amino acid sequence of SEQ ID NO: 48. In some embodiments, the anti-CFHR4 HCDR1 comprises the amino acid sequence of SEQ ID NO: 28; the anti-CFHR4 HCDR2 comprises the amino acid sequence of SEQ ID NO: 39; and the anti-CFHR4 HCDR3 comprises the amino acid sequence of SEQ ID NO: 49. In some embodiments, the anti-CFHR4 HCDR1 comprises the amino acid sequence of SEQ ID NO: 29; the anti-CFHR4 HCDR2 comprises the amino acid sequence of SEQ ID NO: 40; and the anti-CFHR4 HCDR3 comprises the amino acid sequence of SEQ ID NO: 50. In some embodiments, the anti-CFHR4 HCDR1 comprises the amino acid sequence of SEQ ID NO: 30; the anti-CFHR4 HCDR2 comprises the amino acid sequence of SEQ ID NO: 41; and the anti-CFHR4 HCDR3 comprises the amino acid sequence of SEQ ID NO: 51. In some embodiments, the anti-CFHR4 HCDR1 comprises the amino acid sequence of SEQ ID NO: 31; the anti-CFHR4 HCDR2 comprises the amino acid sequence of SEQ ID NO: 42; and the anti-CFHR4 HCDR3 comprises the amino acid sequence of SEQ ID NO: 52. In some embodiments, the anti-CFHR4 HCDR1 comprises the amino acid sequence of SEQ ID NO: 54; the anti-CFHR4 HCDR2 comprises the amino acid sequence of SEQ ID NO: 66; and the anti-CFHR4 HCDR3 comprises the amino acid sequence of SEQ ID NO: 77. In some embodiments, the anti-CFHR4 HCDR1 comprises the amino acid sequence of SEQ ID NO: 55; the anti-CFHR4 HCDR2 comprises the amino acid sequence of SEQ ID NO: 67; and the anti-CFHR4 HCDR3 comprises the amino acid sequence of SEQ ID NO: 78. In some embodiments, the anti-CFHR4 HCDR1 comprises the amino acid sequence of SEQ ID NO: 56; the anti-CFHR4 HCDR2 comprises the amino acid sequence of SEQ ID NO: 68; and the anti-CFHR4 HCDR3 comprises the amino acid sequence of SEQ ID NO: 79. In some embodiments, the anti-CFHR4 HCDR1 comprises the amino acid sequence of SEQ ID NO: 57; the anti-CFHR4 HCDR2 comprises the amino acid sequence of SEQ ID NO: 69; and the anti-CFHR4 HCDR3 comprises the amino acid sequence of SEQ ID NO: 80. In some embodiments, the anti-CFHR4 HCDR1 comprises the amino acid sequence of SEQ ID NO: 58; the anti-CFHR4 HCDR2 comprises the amino acid sequence of SEQ ID NO: 70; and the anti-CFHR4 HCDR3 comprises the amino acid sequence of SEQ ID NO: 81. In some embodiments, the anti-CFHR4 HCDR1 comprises the amino acid sequence of SEQ ID NO: 59; the anti-CFHR4 HCDR2 comprises the amino acid sequence of SEQ ID NO: 71; and the anti-CFHR4 HCDR3 comprises the amino acid sequence of SEQ ID NO: 82. In some embodiments, the anti-CFHR4 HCDR1 comprises the amino acid sequence of SEQ ID NO: 60; the anti-CFHR4 HCDR2 comprises the amino acid sequence of SEQ ID NO: 72; and the anti-CFHR4 HCDR3 comprises the amino acid sequence of SEQ ID NO: 83. In some embodiments, the anti-CFHR4 HCDR1 comprises the amino acid sequence of SEQ ID NO: 61; the anti-CFHR4 HCDR2 comprises the amino acid sequence of SEQ ID NO: 73; and the anti-CFHR4 HCDR3 comprises the amino acid sequence of SEQ ID NO: 84. In some embodiments, the anti-CFHR4 HCDR1 comprises the amino acid sequence of SEQ ID NO: 62; the anti-CFHR4 HCDR2 comprises the amino acid sequence of SEQ ID NO: 74; and the anti-CFHR4 HCDR3 comprises the amino acid sequence of SEQ ID NO: 85. In some embodiments, the anti-CFHR4 HCDR1 comprises the amino acid sequence of SEQ ID NO: 63; the anti-CFHR4 HCDR2 comprises the amino acid sequence of SEQ ID NO: 75; and the anti-CFHR4 HCDR3 comprises the amino acid sequence of SEQ ID NO: 86. In some embodiments, the anti-CFHR4 HCDR1 comprises the amino acid sequence of SEQ ID NO: 64; the anti-CFHR4 HCDR2 comprises the amino acid sequence of SEQ ID NO: 76; and the anti-CFHR4 HCDR3 comprises the amino acid sequence of SEQ ID NO: 87. In some embodiments, the anti-CFHR4 HCDR1 comprises the amino acid sequence of SEQ ID NO: 89; the anti-CFHR4 HCDR2 comprises the amino acid sequence of SEQ ID NO: 103; and the anti-CFHR4 HCDR3 comprises the amino acid sequence of SEQ ID NO: 116. In some embodiments, the anti-CFHR4 HCDR1 comprises the amino acid sequence of SEQ ID NO: 90; the anti-CFHR4 HCDR2 comprises the amino acid sequence of SEQ ID NO: 104; and the anti-CFHR4 HCDR3 comprises the amino acid sequence of SEQ ID NO: 117. In some embodiments, the anti-CFHR4 HCDR1 comprises the amino acid sequence of SEQ ID NO: 91; the anti-CFHR4 HCDR2 comprises the amino acid sequence of SEQ ID NO: 105; and the anti-CFHR4 HCDR3 comprises the amino acid sequence of SEQ ID NO: 118. In some embodiments, the anti-CFHR4 HCDR1 comprises the amino acid sequence of SEQ ID NO: 92; the anti-CFHR4 HCDR2 comprises the amino acid sequence of SEQ ID NO: 106; and the anti-CFHR4 HCDR3 comprises the amino acid sequence of SEQ ID NO: 119. In some embodiments, the anti-CFHR4 HCDR1 comprises the amino acid sequence of SEQ ID NO: 93; the anti-CFHR4 HCDR2 comprises the amino acid sequence of SEQ ID NO: 107; and the anti-CFHR4 HCDR3 comprises the amino acid sequence of SEQ ID NO: 120. In some embodiments, the anti-CFHR4 HCDR1 comprises the amino acid sequence of SEQ ID NO: 94; the anti-CFHR4 HCDR2 comprises the amino acid sequence of SEQ ID NO: 108; and the anti-CFHR4 HCDR3 comprises the amino acid sequence of SEQ ID NO: 121. In some embodiments, the anti-CFHR4 HCDR1 comprises the amino acid sequence of SEQ ID NO: 95; the anti-CFHR4 HCDR2 comprises the amino acid sequence of SEQ ID NO: 109; and the anti-CFHR4 HCDR3 comprises the amino acid sequence of SEQ ID NO: 122. In some embodiments, the anti-CFHR4 HCDR1 comprises the amino acid sequence of SEQ ID NO: 96; the anti-CFHR4 HCDR2 comprises the amino acid sequence of SEQ ID NO: 110; and the anti-CFHR4 HCDR3 comprises the amino acid sequence of SEQ ID NO: 123. In some embodiments, the anti-CFHR4 HCDR1 comprises the amino acid sequence of SEQ ID NO: 97; the anti-CFHR4 HCDR2 comprises the amino acid sequence of SEQ ID NO: 111; and the anti-CFHR4 HCDR3 comprises the amino acid sequence of SEQ ID NO: 124. In some embodiments, the anti-CFHR4 HCDR1 comprises the amino acid sequence of SEQ ID NO: 98; the anti-CFHR4 HCDR2 comprises the amino acid sequence of SEQ ID NO: 112; and the anti-CFHR4 HCDR3 comprises the amino acid sequence of SEQ ID NO: 125. In some embodiments, the anti-CFHR4 HCDR1 comprises the amino acid sequence of SEQ ID NO: 99; the anti-CFHR4 HCDR2 comprises the amino acid sequence of SEQ ID NO: 113; and the HCDR3 comprises the amino acid sequence of SEQ ID NO: 126. In some embodiments, the anti-CFHR4 HCDR1 comprises the amino acid sequence of SEQ ID NO: 100; the HCDR2 comprises the amino acid sequence of SEQ ID NO: 114; and the HCDR3 comprises the amino acid sequence of SEQ ID NO: 127. In some embodiments, the anti-CFHR4 HCDR1 comprises the amino acid sequence of SEQ ID NO: 101; the anti-CFHR4 HCDR2 comprises the amino acid sequence of SEQ ID NO: 115; and the anti-CFHR4 HCDR3 comprises the amino acid sequence of SEQ ID NO: 128.

[0099] In some embodiments, the anti-CFHR4 LCDR1 comprises the amino acid sequence of SEQ ID NO: 130; the anti-CFHR4 LCDR2 comprises the amino acid sequence of SEQ ID NO: 153; and the anti-CFHR4 LCDR3 comprises the amino acid sequence of SEQ ID NO: 175. In some embodiments, the anti-CFHR4 LCDR1 comprises the amino acid sequence of SEQ ID NO: 131; the anti-CFHR4 LCDR2 comprises the amino acid sequence of SEQ ID NO: 154; and the anti-CFHR4 LCDR3 comprises the amino acid sequence of SEQ ID NO: 176. In some embodiments, the anti-CFHR4 LCDR1 comprises the amino acid sequence of SEQ ID NO: 132; the anti-CFHR4 LCDR2 comprises the amino acid sequence of SEQ ID NO: 155; and the anti-CFHR4 LCDR3 comprises the amino acid sequence of SEQ ID NO: 177. In some embodiments, the anti-CFHR4 LCDR1 comprises the amino acid sequence of SEQ ID NO: 133; the anti-CFHR4 LCDR2 comprises the amino acid sequence of SEQ ID NO: 156; and the anti-CFHR4 LCDR3 comprises the amino acid sequence of SEQ ID NO: 178. In some embodiments, the anti-CFHR4 LCDR1 comprises the amino acid sequence of SEQ ID NO: 134; the anti-CFHR4 LCDR2 comprises the amino acid sequence of SEQ ID NO: 157; and the anti-CFHR4 LCDR3 comprises the amino acid sequence of SEQ ID NO: 179. In some embodiments, the anti-CFHR4 LCDR1 comprises the amino acid sequence of SEQ ID NO: 135; the anti-CFHR4 LCDR2 comprises the amino acid sequence of SEQ ID NO: 158; and the anti-CFHR4 LCDR3 comprises the amino acid sequence of SEQ ID NO: 180. In some embodiments, the anti-CFHR4 LCDR1 comprises the amino acid sequence of SEQ ID NO: 136; the anti-CFHR4 LCDR2 comprises the amino acid sequence of SEQ ID NO: 159; and the anti-CFHR4 LCDR3 comprises the amino acid sequence of SEQ ID NO: 181. In some embodiments, the anti-CFHR4 LCDR1 comprises the amino acid sequence of SEQ ID NO: 137; the anti-CFHR4 LCDR2 comprises the amino acid sequence of SEQ ID NO: 160; and the anti-CFHR4 LCDR3 comprises the amino acid sequence of SEQ ID NO: 182. In some embodiments, the anti-CFHR4 LCDR1 comprises the amino acid sequence of SEQ ID NO: 138; the anti-CFHR4 LCDR2 comprises the amino acid sequence of SEQ ID NO: 161; and the anti-CFHR4 LCDR3 comprises the amino acid sequence of SEQ ID NO: 183. In some embodiments, the anti-CFHR4 LCDR1 comprises the amino acid sequence of SEQ ID NO: 139; the anti-CFHR4 LCDR2 comprises the amino acid sequence of SEQ ID NO: 162; and the anti-CFHR4 LCDR3 comprises the amino acid sequence of SEQ ID NO: 184. In some embodiments, the anti-CFHR4 LCDR1 comprises the amino acid sequence of SEQ ID NO: 140; the anti-CFHR4 LCDR2 comprises the amino acid sequence of SEQ ID NO: 163; and the anti-CFHR4 LCDR3 comprises the amino acid sequence of SEQ ID NO: 185. In some embodiments, the anti-CFHR4 LCDR1 comprises the amino acid sequence of SEQ ID NO: 141; the anti-CFHR4 LCDR2 comprises the amino acid sequence of SEQ ID NO: 164; and the anti-CFHR4 LCDR3 comprises the amino acid sequence of SEQ ID NO: 186. In some embodiments, the anti-CFHR4 LCDR1 comprises the amino acid sequence of SEQ ID NO: 142; the anti-CFHR4 LCDR2 comprises the amino acid sequence of SEQ ID NO: 165; and the anti-CFHR4 LCDR3 comprises the amino acid sequence of SEQ ID NO: 187. In some embodiments, the anti-CFHR4 LCDR1 comprises the amino acid sequence of SEQ ID NO: 143; the anti-CFHR4 LCDR2 comprises the amino acid sequence of SEQ ID NO: 166; and the anti-CFHR4 LCDR3 comprises the amino acid sequence of SEQ ID NO: 188. In some embodiments, the anti-CFHR4 LCDR1 comprises the amino acid sequence of SEQ ID NO: 144; the anti-CFHR4 LCDR2 comprises the amino acid sequence of SEQ ID NO: 167; and the anti-CFHR4 LCDR3 comprises the amino acid sequence of SEQ ID NO: 189. In some embodiments, the anti-CFHR4 LCDR1 comprises the amino acid sequence of SEQ ID NO: 145; the anti-CFHR4 LCDR2 comprises the amino acid sequence of SEQ ID NO: 168; and the anti-CFHR4 LCDR3 comprises the amino acid sequence of SEQ ID NO: 190. In some embodiments, the anti-CFHR4 LCDR1 comprises the amino acid sequence of SEQ ID NO: 146; the anti-CFHR4 LCDR2 comprises the amino acid sequence of SEQ ID NO: 169; and the anti-CFHR4 LCDR3 comprises the amino acid sequence of SEQ ID NO: 191. In some embodiments, the anti-CFHR4 LCDR1 comprises the amino acid sequence of SEQ ID NO: 147; the anti-CFHR4 LCDR2 comprises the amino acid sequence of SEQ ID NO: 170; and the anti-CFHR4 LCDR3 comprises the amino acid sequence of SEQ ID NO: 192. In some embodiments, the anti-CFHR4 LCDR1 comprises the amino acid sequence of SEQ ID NO: 148; the anti-CFHR4 LCDR2 comprises the amino acid sequence of SEQ ID NO: 171; and the anti-CFHR4 LCDR3 comprises the amino acid sequence of SEQ ID NO: 193. In some embodiments, the anti-CFHR4 LCDR1 comprises the amino acid sequence of SEQ ID NO: 149; the anti-CFHR4 LCDR2 comprises the amino acid sequence of SEQ ID NO: 172; and the anti-CFHR4 LCDR3 comprises the amino acid sequence of SEQ ID NO: 194. In some embodiments, the anti-CFHR4 LCDR1 comprises the amino acid sequence of SEQ ID NO: 150; the anti-CFHR4 LCDR2 comprises the amino acid sequence of SEQ ID NO: 173; and the anti-CFHR4 LCDR3 comprises the amino acid sequence of SEQ ID NO: 195. In some embodiments, the anti-CFHR4 LCDR1 comprises the amino acid sequence of SEQ ID NO: 151; the anti-CFHR4 LCDR2 comprises the amino acid sequence of SEQ ID NO: 174; and the anti-CFHR4 LCDR3 comprises the amino acid sequence of SEQ ID NO: 196. In some embodiments, the anti-CFHR4 LCDR1 comprises the amino acid sequence of SEQ ID NO: 198; the anti-CFHR4 LCDR2 comprises the amino acid sequence of SEQ ID NO: 201; and the anti-CFHR4 LCDR3 comprises the amino acid sequence of SEQ ID NO: 204. In some embodiments, the anti-CFHR4 LCDR1 comprises the amino acid sequence of SEQ ID NO: 199; the anti-CFHR4 LCDR2 comprises the amino acid sequence of SEQ ID NO: 202; and the anti-CFHR4 LCDR3 comprises the amino acid sequence of SEQ ID NO: 205. In some embodiments, the anti-CFHR4 LCDR1 comprises the amino acid sequence of SEQ ID NO: 207; the anti-CFHR4 LCDR2 comprises the amino acid sequence of SEQ ID NO: 217; and the anti-CFHR4 LCDR3 comprises the amino acid sequence of SEQ ID NO: 227. In some embodiments, the anti-CFHR4 LCDR1 comprises the amino acid sequence of SEQ ID NO: 208; the anti-CFHR4 LCDR2 comprises the amino acid sequence of SEQ ID NO: 218; and the anti-CFHR4 LCDR3 comprises the amino acid sequence of SEQ ID NO: 228. In some embodiments, the anti-CFHR4 LCDR1 comprises the amino acid sequence of SEQ ID NO: 209; the anti-CFHR4 LCDR2 comprises the amino acid sequence of SEQ ID NO: 219; and the anti-CFHR4 LCDR3 comprises the amino acid sequence of SEQ ID NO: 229. In some embodiments, the anti-CFHR4 LCDR1 comprises the amino acid sequence of SEQ ID NO: 210; the anti-CFHR4 LCDR2 comprises the amino acid sequence of SEQ ID NO: 220; and the anti-CFHR4 LCDR3 comprises the amino acid sequence of SEQ ID NO: 230. In some embodiments, the anti-CFHR4 LCDR1 comprises the amino acid sequence of SEQ ID NO: 211; the anti-CFHR4 LCDR2 comprises the amino acid sequence of SEQ ID NO: 221; and the anti-CFHR4 LCDR3 comprises the amino acid sequence of SEQ ID NO: 231. In some embodiments, the anti-CFHR4 LCDR1 comprises the amino acid sequence of SEQ ID NO: 212; the anti-CFHR4 LCDR2 comprises the amino acid sequence of SEQ ID NO: 222; and the anti-CFHR4 LCDR3 comprises the amino acid sequence of SEQ ID NO: 232. In some embodiments, the anti-CFHR4 LCDR1 comprises the amino acid sequence of SEQ ID NO: 213; the anti-CFHR4 LCDR2 comprises the amino acid sequence of SEQ ID NO: 223; and the anti-CFHR4 LCDR3 comprises the amino acid sequence of SEQ ID NO: 233. In some embodiments, the anti-CFHR4 LCDR1 comprises the amino acid sequence of SEQ ID NO: 214; the anti-CFHR4 LCDR2 comprises the amino acid sequence of SEQ ID NO: 224; and the anti-CFHR4 LCDR3 comprises the amino acid sequence of SEQ ID NO: 234. In some embodiments, the anti-CFHR4 LCDR1 comprises the amino acid sequence of SEQ ID NO: 215; the anti-CFHR4 LCDR2 comprises the amino acid sequence of SEQ ID NO: 225; and the anti-CFHR4 LCDR3 comprises the amino acid sequence of SEQ ID NO: 235. In some embodiments, the anti-CFHR4 LCDR1 comprises the amino acid sequence of SEQ ID NO: 237; the anti-CFHR4 LCDR2 comprises the amino acid sequence of SEQ ID NO: 245; and the anti-CFHR4 LCDR3 comprises the amino acid sequence of SEQ ID NO: 253. In some embodiments, the anti-CFHR4 LCDR1 comprises the amino acid sequence of SEQ ID NO: 238; the anti-CFHR4 LCDR2 comprises the amino acid sequence of SEQ ID NO: 246; and the anti-CFHR4 LCDR3 comprises the amino acid sequence of SEQ ID NO: 254. In some embodiments, the anti-CFHR4 LCDR1 comprises the amino acid sequence of SEQ ID NO: 239; the anti-CFHR4 LCDR2 comprises the amino acid sequence of SEQ ID NO: 247; and the anti-CFHR4 LCDR3 comprises the amino acid sequence of SEQ ID NO: 255. In some embodiments, the anti-CFHR4 LCDR1 comprises the amino acid sequence of SEQ ID NO: 240; the anti-CFHR4 LCDR2 comprises the amino acid sequence of SEQ ID NO: 248; and the anti-CFHR4 LCDR3 comprises the amino acid sequence of SEQ ID NO: 256. In some embodiments, the anti-CFHR4 LCDR1 comprises the amino acid sequence of SEQ ID NO: 241; the anti-CFHR4 LCDR2 comprises the amino acid sequence of SEQ ID NO: 249; and the anti-CFHR4 LCDR3 comprises the amino acid sequence of SEQ ID NO: 257. In some embodiments, the anti-CFHR4 LCDR1 comprises the amino acid sequence of SEQ ID NO: 242; the anti-CFHR4 LCDR2 comprises the amino acid sequence of SEQ ID NO: 250; and the anti-CFHR4 LCDR3 comprises the amino acid sequence of SEQ ID NO: 258. In some embodiments, the anti-CFHR4 LCDR1 comprises the amino acid sequence of SEQ ID NO: 243; the anti-CFHR4 LCDR2 comprises the amino acid sequence of SEQ ID NO: 251; and the anti-CFHR4 LCDR3 comprises the amino acid sequence of SEQ ID NO: 259.

[0100] In some embodiments, the bispecific antibodies of the present disclosure comprise an anti-C3 VH that comprises an amino acid sequence having at least 90% (e.g., at least 90%, 91%, 92%, 93%, 94%, 95%, 96%, 97%, 98%, 99%, or 100%) sequence identity to at least one of SEQ ID NOs: 1127-1200. In some embodiments, the bispecific antibodies of the present disclosure comprise an anti-C3 VL that comprises an amino acid sequence having at least 90% (e.g., at least 90%, 91%, 92%, 93%, 94%, 95%, 96%, 97%, 98%, 99%, or 100%) sequence identity to at least one of SEQ ID NOs: 1275-1348.

[0101] In accordance with these embodiments, the anti-C3 HCDR1 comprises the amino acid sequence of SEQ ID NO: 583; the anti-C3 HCDR2 comprises the amino acid sequence of SEQ ID NO: 602; and the anti-C3 HCDR3 comprises the amino acid sequence of SEQ ID NO: 620. In some embodiments, the anti-C3 HCDR1 comprises the amino acid sequence of SEQ ID NO: 584; the anti-C3 HCDR2 comprises the amino acid sequence of SEQ ID NO: 603; and the anti-C3 HCDR3 comprises the amino acid sequence of SEQ ID NO: 621. In some embodiments, the anti-C3 HCDR1 comprises the amino acid sequence of SEQ ID NO: 585; the anti-C3 HCDR2 comprises the amino acid sequence of SEQ ID NO: 604; and the anti-C3 HCDR3 comprises the amino acid sequence of SEQ ID NO: 622. In some embodiments, the anti-C3 HCDR1 comprises the amino acid sequence of SEQ ID NO: 586; the anti-C3 HCDR2 comprises the amino acid sequence of SEQ ID NO: 605; and the anti-C3 HCDR3 comprises the amino acid sequence of SEQ ID NO: 623. In some embodiments, the anti-C3 HCDR1 comprises the amino acid sequence of SEQ ID NO: 587; the anti-C3 HCDR2 comprises the amino acid sequence of SEQ ID NO: 606; and the anti-C3 HCDR3 comprises the amino acid sequence of SEQ ID NO: 624. In some embodiments, the anti-C3 HCDR1 comprises the amino acid sequence of SEQ ID NO: 588; the anti-C3 HCDR2 comprises the amino acid sequence of SEQ ID NO: 607; and the anti-C3 HCDR3 comprises the amino acid sequence of SEQ ID NO: 625. In some embodiments, the anti-C3 HCDR1 comprises the amino acid sequence of SEQ ID NO: 589; the anti-C3 HCDR2 comprises the amino acid sequence of SEQ ID NO: 608; and the anti-C3 HCDR3 comprises the amino acid sequence of SEQ ID NO: 626. In some embodiments, the anti-C3 HCDR1 comprises the amino acid sequence of SEQ ID NO: 590; the anti-C3 HCDR2 comprises the amino acid sequence of SEQ ID NO: 609; and the anti-C3 HCDR3 comprises the amino acid sequence of SEQ ID NO: 627. In some embodiments, the anti-C3 HCDR1 comprises the amino acid sequence of SEQ ID NO: 591; the anti-C3 HCDR2 comprises the amino acid sequence of SEQ ID NO: 610; and the anti-C3 HCDR3 comprises the amino acid sequence of SEQ ID NO: 628. In some embodiments, the anti-C3 HCDR1 comprises the amino acid sequence of SEQ ID NO: 592; the anti-C3 HCDR2 comprises the amino acid sequence of SEQ ID NO: 611; and the anti-C3 HCDR3 comprises the amino acid sequence of SEQ ID NO: 629. In some embodiments, the anti-C3 HCDR1 comprises the amino acid sequence of SEQ ID NO: 593; the anti-C3 HCDR2 comprises the amino acid sequence of SEQ ID NO: 612; and the anti-C3 HCDR3 comprises the amino acid sequence of SEQ ID NO: 630. In some embodiments, the anti-C3 HCDR1 comprises the amino acid sequence of SEQ ID NO: 594; the anti-C3 HCDR2 comprises the amino acid sequence of SEQ ID NO: 613; and the anti-C3 HCDR3 comprises the amino acid sequence of SEQ ID NO: 631. In some embodiments, the anti-C3 HCDR1 comprises the amino acid sequence of SEQ ID NO: 595; the anti-C3 HCDR2 comprises the amino acid sequence of SEQ ID NO: 614; and the anti-C3 HCDR3 comprises the amino acid sequence of SEQ ID NO: 632. In some embodiments, the anti-C3 HCDR1 comprises the amino acid sequence of SEQ ID NO: 596; the anti-C3 HCDR2 comprises the amino acid sequence of SEQ ID NO: 615; and the anti-C3 HCDR3 comprises the amino acid sequence of SEQ ID NO: 633. In some embodiments, the anti-C3 HCDR1 comprises the amino acid sequence of SEQ ID NO: 597; the anti-C3 HCDR2 comprises the amino acid sequence of SEQ ID NO: 616; and the anti-C3 HCDR3 comprises the amino acid sequence of SEQ ID NO: 634. In some embodiments, the anti-C3 HCDR1 comprises the amino acid sequence of SEQ ID NO: 598; the anti-C3 HCDR2 comprises the amino acid sequence of SEQ ID NO: 617; and the anti-C3 HCDR3 comprises the amino acid sequence of SEQ ID NO: 635. In some embodiments, the anti-C3 HCDR1 comprises the amino acid sequence of SEQ ID NO: 599; the anti-C3 HCDR2 comprises the amino acid sequence of SEQ ID NO: 618; and the anti-C3 HCDR3 comprises the amino acid sequence of SEQ ID NO: 636. In some embodiments, the anti-C3 HCDR1 comprises the amino acid sequence of SEQ ID NO: 600; the anti-C3 HCDR2 comprises the amino acid sequence of SEQ ID NO: 619; and the anti-C3 HCDR3 comprises the amino acid sequence of SEQ ID NO: 637. In some embodiments, the anti-C3 HCDR1 comprises the amino acid sequence of SEQ ID NO: 639; the anti-C3 HCDR2 comprises the amino acid sequence of SEQ ID NO: 652; and the anti-C3 HCDR3 comprises the amino acid sequence of SEQ ID NO: 664. In some embodiments, the anti-C3 HCDR1 comprises the amino acid sequence of SEQ ID NO: 640; the anti-C3 HCDR2 comprises the amino acid sequence of SEQ ID NO: 653; and the anti-C3 HCDR3 comprises the amino acid sequence of SEQ ID NO: 665. In some embodiments, the anti-C3 HCDR1 comprises the amino acid sequence of SEQ ID NO: 641; the anti-C3 HCDR2 comprises the amino acid sequence of SEQ ID NO: 654; and the anti-C3 HCDR3 comprises the amino acid sequence of SEQ ID NO: 666. In some embodiments, the anti-C3 HCDR1 comprises the amino acid sequence of SEQ ID NO: 642; the anti-C3 HCDR2 comprises the amino acid sequence of SEQ ID NO: 655; and the anti-C3 HCDR3 comprises the amino acid sequence of SEQ ID NO: 667. In some embodiments, the anti-C3 HCDR1 comprises the amino acid sequence of SEQ ID NO: 643; the anti-C3 HCDR2 comprises the amino acid sequence of SEQ ID NO: 656; and the anti-C3 HCDR3 comprises the amino acid sequence of SEQ ID NO: 668. In some embodiments, the anti-C3 HCDR1 comprises the amino acid sequence of SEQ ID NO: 644; the anti-C3 HCDR2 comprises the amino acid sequence of SEQ ID NO: 657; and the anti-C3 HCDR3 comprises the amino acid sequence of SEQ ID NO: 669. In some embodiments, the anti-C3 HCDR1 comprises the amino acid sequence of SEQ ID NO: 645; the anti-C3 HCDR2 comprises the amino acid sequence of SEQ ID NO: 658; and the anti-C3 HCDR3 comprises the amino acid sequence of SEQ ID NO: 670. In some embodiments, the anti-C3 HCDR1 comprises the amino acid sequence of SEQ ID NO: 646; the anti-C3 HCDR2 comprises the amino acid sequence of SEQ ID NO: 659; and the anti-C3 HCDR3 comprises the amino acid sequence of SEQ ID NO: 671. In some embodiments, the anti-C3 HCDR1 comprises the amino acid sequence of SEQ ID NO: 647; the anti-C3 HCDR2 comprises the amino acid sequence of SEQ ID NO: 660; and the anti-C3 HCDR3 comprises the amino acid sequence of SEQ ID NO: 672. In some embodiments, the anti-C3 HCDR1 comprises the amino acid sequence of SEQ ID NO: 648; the anti-C3 HCDR2 comprises the amino acid sequence of SEQ ID NO: 661; and the anti-C3 HCDR3 comprises the amino acid sequence of SEQ ID NO: 673. In some embodiments, the anti-C3 HCDR1 comprises the amino acid sequence of SEQ ID NO: 649; the anti-C3 HCDR2 comprises the amino acid sequence of SEQ ID NO: 662; and the anti-C3 HCDR3 comprises the amino acid sequence of SEQ ID NO: 674. In some embodiments, the anti-C3 HCDR1 comprises the amino acid sequence of SEQ ID NO: 650; the anti-C3 HCDR2 comprises the amino acid sequence of SEQ ID NO: 663; and the anti-C3 HCDR3 comprises the amino acid sequence of SEQ ID NO: 675. In some embodiments, the anti-C3 HCDR1 comprises the amino acid sequence of SEQ ID NO: 677; the anti-C3 HCDR2 comprises the amino acid sequence of SEQ ID NO: 706; and the anti-C3 HCDR3 comprises the amino acid sequence of SEQ ID NO: 734. In some embodiments, the anti-C3 HCDR1 comprises the amino acid sequence of SEQ ID NO: 678; the anti-C3 HCDR2 comprises the amino acid sequence of SEQ ID NO: 707; and the anti-C3 HCDR3 comprises the amino acid sequence of SEQ ID NO: 735. In some embodiments, the anti-C3 HCDR1 comprises the amino acid sequence of SEQ ID NO: 679; the anti-C3 HCDR2 comprises the amino acid sequence of SEQ ID NO: 708; and the anti-C3 HCDR3 comprises the amino acid sequence of SEQ ID NO: 736. In some embodiments, the anti-C3 HCDR1 comprises the amino acid sequence of SEQ ID NO: 680; the anti-C3 HCDR2 comprises the amino acid sequence of SEQ ID NO: 709; and the anti-C3 HCDR3 comprises the amino acid sequence of SEQ ID NO: 737. In some embodiments, the anti-C3 HCDR1 comprises the amino acid sequence of SEQ ID NO: 681; the anti-C3 HCDR2 comprises the amino acid sequence of SEQ ID NO: 710; and the anti-C3 HCDR3 comprises the amino acid sequence of SEQ ID NO: 738. In some embodiments, the anti-C3 HCDR1 comprises the amino acid sequence of SEQ ID NO: 682; the anti-C3 HCDR2 comprises the amino acid sequence of SEQ ID NO: 711; and the anti-C3 HCDR3 comprises the amino acid sequence of SEQ ID NO: 739. In some embodiments, the anti-C3 HCDR1 comprises the amino acid sequence of SEQ ID NO: 683; the anti-C3 HCDR2 comprises the amino acid sequence of SEQ ID NO: 712; and the anti-C3 HCDR3 comprises the amino acid sequence of SEQ ID NO: 740. In some embodiments, the anti-C3 HCDR1 comprises the amino acid sequence of SEQ ID NO: 684; the anti-C3 HCDR2 comprises the amino acid sequence of SEQ ID NO: 713; and the anti-C3 HCDR3 comprises the amino acid sequence of SEQ ID NO: 741. In some embodiments, the anti-C3 HCDR1 comprises the amino acid sequence of SEQ ID NO: 685; the anti-C3 HCDR2 comprises the amino acid sequence of SEQ ID NO: 714; and the anti-C3 HCDR3 comprises the amino acid sequence of SEQ ID NO: 742. In some embodiments, the anti-C3 HCDR1 comprises the amino acid sequence of SEQ ID NO: 686; the anti-C3 HCDR2 comprises the amino acid sequence of SEQ ID NO: 715; and the anti-C3 HCDR3 comprises the amino acid sequence of SEQ ID NO: 743. In some embodiments, the anti-C3 HCDR1 comprises the amino acid sequence of SEQ ID NO: 687; the anti-C3 HCDR2 comprises the amino acid sequence of SEQ ID NO: 716; and the anti-C3 HCDR3 comprises the amino acid sequence of SEQ ID NO: 744. In some embodiments, the anti-C3 HCDR1 comprises the amino acid sequence of SEQ ID NO: 688; the anti-C3 HCDR2 comprises the amino acid sequence of SEQ ID NO: 717; and the anti-C3 HCDR3 comprises the amino acid sequence of SEQ ID NO: 745. In some embodiments, the anti-C3 HCDR1 comprises the amino acid sequence of SEQ ID NO: 689; the anti-C3 HCDR2 comprises the amino acid sequence of SEQ ID NO: 718; and the anti-C3 HCDR3 comprises the amino acid sequence of SEQ ID NO: 746. In some embodiments, the anti-C3 HCDR1 comprises the amino acid sequence of SEQ ID NO: 690; the anti-C3 HCDR2 comprises the amino acid sequence of SEQ ID NO: 719; and the anti-C3 HCDR3 comprises the amino acid sequence of SEQ ID NO: 747. In some embodiments, the anti-C3 HCDR1 comprises the amino acid sequence of SEQ ID NO: 691; the anti-C3 HCDR2 comprises the amino acid sequence of SEQ ID NO: 720; and the anti-C3 HCDR3 comprises the amino acid sequence of SEQ ID NO: 748. In some embodiments, the anti-C3 HCDR1 comprises the amino acid sequence of SEQ ID NO: 692; the anti-C3 HCDR2 comprises the amino acid sequence of SEQ ID NO: 721; and the anti-C3 HCDR3 comprises the amino acid sequence of SEQ ID NO: 749. In some embodiments, the anti-C3 HCDR1 comprises the amino acid sequence of SEQ ID NO: 693; the anti-C3 HCDR2 comprises the amino acid sequence of SEQ ID NO: 722; and the anti-C3 HCDR3 comprises the amino acid sequence of SEQ ID NO: 750. In some embodiments, the anti-C3 HCDR1 comprises the amino acid sequence of SEQ ID NO: 694; the anti-C3 HCDR2 comprises the amino acid sequence of SEQ ID NO: 723; and the anti-C3 HCDR3 comprises the amino acid sequence of SEQ ID NO: 751. In some embodiments, the anti-C3 HCDR1 comprises the amino acid sequence of SEQ ID NO: 695; the anti-C3 HCDR2 comprises the amino acid sequence of SEQ ID NO: 724; and the anti-C3 HCDR3 comprises the amino acid sequence of SEQ ID NO: 752. In some embodiments, the anti-C3 HCDR1 comprises the amino acid sequence of SEQ ID NO: 696; the anti-C3 HCDR2 comprises the amino acid sequence of SEQ ID NO: 725; and the anti-C3 HCDR3 comprises the amino acid sequence of SEQ ID NO: 753. In some embodiments, the anti-C3 HCDR1 comprises the amino acid sequence of SEQ ID NO: 697; the anti-C3 HCDR2 comprises the amino acid sequence of SEQ ID NO: 726; and the anti-C3 HCDR3 comprises the amino acid sequence of SEQ ID NO: 754. In some embodiments, the anti-C3 HCDR1 comprises the amino acid sequence of SEQ ID NO: 698; the anti-C3 HCDR2 comprises the amino acid sequence of SEQ ID NO: 727; and the anti-C3 HCDR3 comprises the amino acid sequence of SEQ ID NO: 755. In some embodiments, the anti-C3 HCDR1 comprises the amino acid sequence of SEQ ID NO: 699; the anti-C3 HCDR2 comprises the amino acid sequence of SEQ ID NO: 728; and the anti-C3 HCDR3 comprises the amino acid sequence of SEQ ID NO: 756. In some embodiments, the anti-C3 HCDR1 comprises the amino acid sequence of SEQ ID NO: 700; the anti-C3 HCDR2 comprises the amino acid sequence of SEQ ID NO: 729; and the anti-C3 HCDR3 comprises the amino acid sequence of SEQ ID NO: 757. In some embodiments, the anti-C3 HCDR1 comprises the amino acid sequence of SEQ ID NO: 701; the anti-C3 HCDR2 comprises the amino acid sequence of SEQ ID NO: 730; and the anti-C3 HCDR3 comprises the amino acid sequence of SEQ ID NO: 758. In some embodiments, the anti-C3 HCDR1 comprises the amino acid sequence of SEQ ID NO: 702; the anti-C3 HCDR2 comprises the amino acid sequence of SEQ ID NO: 731; and the anti-C3 HCDR3 comprises the amino acid sequence of SEQ ID NO: 759. In some embodiments, the anti-C3 HCDR1 comprises the amino acid sequence of SEQ ID NO: 703; the anti-C3 HCDR2 comprises the amino acid sequence of SEQ ID NO: 732; and the anti-C3 HCDR3 comprises the amino acid sequence of SEQ ID NO: 760. In some embodiments, the anti-C3 HCDR1 comprises the amino acid sequence of SEQ ID NO: 704; the anti-C3 HCDR2 comprises the amino acid sequence of SEQ ID NO: 733; and the anti-C3 HCDR3 comprises the amino acid sequence of SEQ ID NO: 761. In some embodiments, the anti-C3 HCDR1 comprises the amino acid sequence of SEQ ID NO: 763; the anti-C3 HCDR2 comprises the amino acid sequence of SEQ ID NO: 771; and the anti-C3 HCDR3 comprises the amino acid sequence of SEQ ID NO: 778. In some embodiments, the anti-C3 HCDR1 comprises the amino acid sequence of SEQ ID NO: 764; the anti-C3 HCDR2 comprises the amino acid sequence of SEQ ID NO: 772; and the anti-C3 HCDR3 comprises the amino acid sequence of SEQ ID NO: 779. In some embodiments, the anti-C3 HCDR1 comprises the amino acid sequence of SEQ ID NO: 765; the anti-C3 HCDR2 comprises the amino acid sequence of SEQ ID NO: 773; and the anti-C3 HCDR3 comprises the amino acid sequence of SEQ ID NO: 780. In some embodiments, the anti-C3 HCDR1 comprises the amino acid sequence of SEQ ID NO: 766; the anti-C3 HCDR2 comprises the amino acid sequence of SEQ ID NO: 774; and the anti-C3 HCDR3 comprises the amino acid sequence of SEQ ID NO: 781. In some embodiments, the anti-C3 HCDR1 comprises the amino acid sequence of SEQ ID NO: 767; the anti-C3 HCDR2 comprises the amino acid sequence of SEQ ID NO: 775; and the anti-C3 HCDR3 comprises the amino acid sequence of SEQ ID NO: 782. In some embodiments, the anti-C3 HCDR1 comprises the amino acid sequence of SEQ ID NO: 768; the anti-C3 HCDR2 comprises the amino acid sequence of SEQ ID NO: 776; and the anti-C3 HCDR3 comprises the amino acid sequence of SEQ ID NO: 783. In some embodiments, the anti-C3 HCDR1 comprises the amino acid sequence of SEQ ID NO: 769; the anti-C3 HCDR2 comprises the amino acid sequence of SEQ ID NO: 777; and the anti-C3 HCDR3 comprises the amino acid sequence of SEQ ID NO: 784. In some embodiments, the anti-C3 HCDR1 comprises the amino acid sequence of SEQ ID NO: 786; the anti-C3 HCDR2 comprises the amino acid sequence of SEQ ID NO: 794; and the anti-C3 HCDR3 comprises the amino acid sequence of SEQ ID NO: 801. In some embodiments, the anti-C3 HCDR1 comprises the amino acid sequence of SEQ ID NO: 787; the anti-C3 HCDR2 comprises the amino acid sequence of SEQ ID NO: 795; and the anti-C3 HCDR3 comprises the amino acid sequence of SEQ ID NO: 802. In some embodiments, the anti-C3 HCDR1 comprises the amino acid sequence of SEQ ID NO: 788; the anti-C3 HCDR2 comprises the amino acid sequence of SEQ ID NO: 796; and the anti-C3 HCDR3 comprises the amino acid sequence of SEQ ID NO: 803. In some embodiments, the anti-C3 HCDR1 comprises the amino acid sequence of SEQ ID NO: 789; the anti-C3 HCDR2 comprises the amino acid sequence of SEQ ID NO: 797; and the anti-C3 HCDR3 comprises the amino acid sequence of SEQ ID NO: 804. In some embodiments, the anti-C3 HCDR1 comprises the amino acid sequence of SEQ ID NO: 790; the anti-C3 HCDR2 comprises the amino acid sequence of SEQ ID NO: 798; and the anti-C3 HCDR3 comprises the amino acid sequence of SEQ ID NO: 805. In some embodiments, the anti-C3 HCDR1 comprises the amino acid sequence of SEQ ID NO: 791; the anti-C3 HCDR2 comprises the amino acid sequence of SEQ ID NO: 799; and the anti-C3 HCDR3 comprises the amino acid sequence of SEQ ID NO: 806. In some embodiments, the anti-C3 HCDR1 comprises the amino acid sequence of SEQ ID NO: 792; the anti-C3 HCDR2 comprises the amino acid sequence of SEQ ID NO: 800; and the anti-C3 HCDR3 comprises the amino acid sequence of SEQ ID NO: 807. In some embodiments, the anti-C3 HCDR1 comprises the amino acid sequence of SEQ ID NO: 809; the anti-C3 HCDR2 comprises the amino acid sequence of SEQ ID NO: 812; and the anti-C3 HCDR3 comprises the amino acid sequence of SEQ ID NO: 815. In some embodiments, the anti-C3 HCDR1 comprises the amino acid sequence of SEQ ID NO: 810; the anti-C3 HCDR2 comprises the amino acid sequence of SEQ ID NO: 813; and the anti-C3 HCDR3 comprises the amino acid sequence of SEQ ID NO: 816.

[0102] In some embodiments, the anti-C3 LCDR1 comprises the amino acid sequence of SEQ ID NO: 818; the anti-C3 LCDR2 comprises the amino acid sequence of SEQ ID NO: 850; and the anti-C3 LCDR3 comprises the amino acid sequence of SEQ ID NO: 881. In some embodiments, the anti-C3 LCDR1 comprises the amino acid sequence of SEQ ID NO: 819; the anti-C3 LCDR2 comprises the amino acid sequence of SEQ ID NO: 851; and the anti-C3 LCDR3 comprises the amino acid sequence of SEQ ID NO: 882. In some embodiments, the anti-C3 LCDR1 comprises the amino acid sequence of SEQ ID NO: 820; the anti-C3 LCDR2 comprises the amino acid sequence of SEQ ID NO: 852; and the anti-C3 LCDR3 comprises the amino acid sequence of SEQ ID NO: 883. In some embodiments, the anti-C3 LCDR1 comprises the amino acid sequence of SEQ ID NO: 821; the anti-C3 LCDR2 comprises the amino acid sequence of SEQ ID NO: 853; and the anti-C3 LCDR3 comprises the amino acid sequence of SEQ ID NO: 884. In some embodiments, the anti-C3 LCDR1 comprises the amino acid sequence of SEQ ID NO: 822; the anti-C3 LCDR2 comprises the amino acid sequence of SEQ ID NO: 854; and the anti-C3 LCDR3 comprises the amino acid sequence of SEQ ID NO: 885. In some embodiments, the anti-C3 LCDR1 comprises the amino acid sequence of SEQ ID NO: 823; the anti-C3 LCDR2 comprises the amino acid sequence of SEQ ID NO: 855; and the anti-C3 LCDR3 comprises the amino acid sequence of SEQ ID NO: 886. In some embodiments, the anti-C3 LCDR1 comprises the amino acid sequence of SEQ ID NO: 824; the anti-C3 LCDR2 comprises the amino acid sequence of SEQ ID NO: 856; and the anti-C3 LCDR3 comprises the amino acid sequence of SEQ ID NO: 887. In some embodiments, the anti-C3 LCDR1 comprises the amino acid sequence of SEQ ID NO: 825; the anti-C3 LCDR2 comprises the amino acid sequence of SEQ ID NO: 857; and the anti-C3 LCDR3 comprises the amino acid sequence of SEQ ID NO: 888. In some embodiments, the anti-C3 LCDR1 comprises the amino acid sequence of SEQ ID NO: 826; the anti-C3 LCDR2 comprises the amino acid sequence of SEQ ID NO: 858; and the anti-C3 LCDR3 comprises the amino acid sequence of SEQ ID NO: 889. In some embodiments, the anti-C3 LCDR1 comprises the amino acid sequence of SEQ ID NO: 827; the anti-C3 LCDR2 comprises the amino acid sequence of SEQ ID NO: 859; and the anti-C3 LCDR3 comprises the amino acid sequence of SEQ ID NO: 890. In some embodiments, the anti-C3 LCDR1 comprises the amino acid sequence of SEQ ID NO: 828; the anti-C3 LCDR2 comprises the amino acid sequence of SEQ ID NO: 860; and the anti-C3 LCDR3 comprises the amino acid sequence of SEQ ID NO: 891. In some embodiments, the anti-C3 LCDR1 comprises the amino acid sequence of SEQ ID NO: 829; the anti-C3 LCDR2 comprises the amino acid sequence of SEQ ID NO: 861; and the anti-C3 LCDR3 comprises the amino acid sequence of SEQ ID NO: 892. In some embodiments, the anti-C3 LCDR1 comprises the amino acid sequence of SEQ ID NO: 830; the anti-C3 LCDR2 comprises the amino acid sequence of SEQ ID NO: 862; and the anti-C3 LCDR3 comprises the amino acid sequence of SEQ ID NO: 893. In some embodiments, the anti-C3 LCDR1 comprises the amino acid sequence of SEQ ID NO: 831; the anti-C3 LCDR2 comprises the amino acid sequence of SEQ ID NO: 863; and the anti-C3 LCDR3 comprises the amino acid sequence of SEQ ID NO: 894. In some embodiments, the anti-C3 LCDR1 comprises the amino acid sequence of SEQ ID NO: 832; the anti-C3 LCDR2 comprises the amino acid sequence of SEQ ID NO: 864; and the anti-C3 LCDR3 comprises the amino acid sequence of SEQ ID NO: 895. In some embodiments, the anti-C3 LCDR1 comprises the amino acid sequence of SEQ ID NO: 833; the anti-C3 LCDR2 comprises the amino acid sequence of SEQ ID NO: 865; and the anti-C3 LCDR3 comprises the amino acid sequence of SEQ ID NO: 896. In some embodiments, the anti-C3 LCDR1 comprises the amino acid sequence of SEQ ID NO: 834; the anti-C3 LCDR2 comprises the amino acid sequence of SEQ ID NO: 866; and the anti-C3 LCDR3 comprises the amino acid sequence of SEQ ID NO: 897. In some embodiments, the anti-C3 LCDR1 comprises the amino acid sequence of SEQ ID NO: 835; the anti-C3 LCDR2 comprises the amino acid sequence of SEQ ID NO: 867; and the anti-C3 LCDR3 comprises the amino acid sequence of SEQ ID NO: 898. In some embodiments, the anti-C3 LCDR1 comprises the amino acid sequence of SEQ ID NO: 836; the anti-C3 LCDR2 comprises the amino acid sequence of SEQ ID NO: 868; and the anti-C3 LCDR3 comprises the amino acid sequence of SEQ ID NO: 899. In some embodiments, the anti-C3 LCDR1 comprises the amino acid sequence of SEQ ID NO: 837; the anti-C3 LCDR2 comprises the amino acid sequence of SEQ ID NO: 869; and the anti-C3 LCDR3 comprises the amino acid sequence of SEQ ID NO: 900. In some embodiments, the anti-C3 LCDR1 comprises the amino acid sequence of SEQ ID NO: 838; the anti-C3 LCDR2 comprises the amino acid sequence of SEQ ID NO: 870; and the anti-C3 LCDR3 comprises the amino acid sequence of SEQ ID NO: 901. In some embodiments, the anti-C3 LCDR1 comprises the amino acid sequence of SEQ ID NO: 839; the anti-C3 LCDR2 comprises the amino acid sequence of SEQ ID NO: 871; and the anti-C3 LCDR3 comprises the amino acid sequence of SEQ ID NO: 902. In some embodiments, the anti-C3 LCDR1 comprises the amino acid sequence of SEQ ID NO: 840; the anti-C3 LCDR2 comprises the amino acid sequence of SEQ ID NO: 872; and the anti-C3 LCDR3 comprises the amino acid sequence of SEQ ID NO: 903. In some embodiments, the anti-C3 LCDR1 comprises the amino acid sequence of SEQ ID NO: 841; the anti-C3 LCDR2 comprises the amino acid sequence of SEQ ID NO: 873; and the anti-C3 LCDR3 comprises the amino acid sequence of SEQ ID NO: 904. In some embodiments, the anti-C3 LCDR1 comprises the amino acid sequence of SEQ ID NO: 842; the anti-C3 LCDR2 comprises the amino acid sequence of SEQ ID NO: 874; and the anti-C3 LCDR3 comprises the amino acid sequence of SEQ ID NO: 905. In some embodiments, the anti-C3 LCDR1 comprises the amino acid sequence of SEQ ID NO: 843; the anti-C3 LCDR2 comprises the amino acid sequence of SEQ ID NO: 875; and the anti-C3 LCDR3 comprises the amino acid sequence of SEQ ID NO: 906. In some embodiments, the anti-C3 LCDR1 comprises the amino acid sequence of SEQ ID NO: 844; the anti-C3 LCDR2 comprises the amino acid sequence of SEQ ID NO: 876; and the anti-C3 LCDR3 comprises the amino acid sequence of SEQ ID NO: 907. In some embodiments, the anti-C3 LCDR1 comprises the amino acid sequence of SEQ ID NO: 845; the anti-C3 LCDR2 comprises the amino acid sequence of SEQ ID NO: 877; and the anti-C3 LCDR3 comprises the amino acid sequence of SEQ ID NO: 908. In some embodiments, the anti-C3 LCDR1 comprises the amino acid sequence of SEQ ID NO: 846; the anti-C3 LCDR2 comprises the amino acid sequence of SEQ ID NO: 878; and the anti-C3 LCDR3 comprises the amino acid sequence of SEQ ID NO: 909. In some embodiments, the anti-C3 LCDR1 comprises the amino acid sequence of SEQ ID NO: 847; the anti-C3 LCDR2 comprises the amino acid sequence of SEQ ID NO: 879; and the anti-C3 LCDR3 comprises the amino acid sequence of SEQ ID NO: 910. In some embodiments, the anti-C3 LCDR1 comprises the amino acid sequence of SEQ ID NO: 848; the anti-C3 LCDR2 comprises the amino acid sequence of SEQ ID NO: 880; and the anti-C3 LCDR3 comprises the amino acid sequence of SEQ ID NO: 911. In some embodiments, the anti-C3 LCDR1 comprises the amino acid sequence of SEQ ID NO: 913; the anti-C3 LCDR2 comprises the amino acid sequence of SEQ ID NO: 916; and the anti-C3 LCDR3 comprises the amino acid sequence of SEQ ID NO: 919. In some embodiments, the anti-C3 LCDR1 comprises the amino acid sequence of SEQ ID NO: 914; the anti-C3 LCDR2 comprises the amino acid sequence of SEQ ID NO: 917; and the anti-C3 LCDR3 comprises the amino acid sequence of SEQ ID NO: 920. In some embodiments, the anti-C3 LCDR1 comprises the amino acid sequence of SEQ ID NO: 914; the anti-C3 LCDR2 comprises the amino acid sequence of SEQ ID NO: 917; and the anti-C3 LCDR3 comprises the amino acid sequence of SEQ ID NO: 920. In some embodiments, the anti-C3 LCDR1 comprises the amino acid sequence of SEQ ID NO: 922; the anti-C3 LCDR2 comprises the amino acid sequence of SEQ ID NO: 931; and the anti-C3 LCDR3 comprises the amino acid sequence of SEQ ID NO: 940. In some embodiments, the anti-C3 LCDR1 comprises the amino acid sequence of SEQ ID NO: 923; the anti-C3 LCDR2 comprises the amino acid sequence of SEQ ID NO: 932; and the anti-C3 LCDR3 comprises the amino acid sequence of SEQ ID NO: 941. In some embodiments, the anti-C3 LCDR1 comprises the amino acid sequence of SEQ ID NO: 924; the anti-C3 LCDR2 comprises the amino acid sequence of SEQ ID NO: 933; and the anti-C3 LCDR3 comprises the amino acid sequence of SEQ ID NO: 942. In some embodiments, the anti-C3 LCDR1 comprises the amino acid sequence of SEQ ID NO: 925; the anti-C3 LCDR2 comprises the amino acid sequence of SEQ ID NO: 934; and the anti-C3 LCDR3 comprises the amino acid sequence of SEQ ID NO: 943. In some embodiments, the anti-C3 LCDR1 comprises the amino acid sequence of SEQ ID NO: 926; the anti-C3 LCDR2 comprises the amino acid sequence of SEQ ID NO: 935; and the anti-C3 LCDR3 comprises the amino acid sequence of SEQ ID NO: 944. In some embodiments, the anti-C3 LCDR1 comprises the amino acid sequence of SEQ ID NO: 927; the anti-C3 LCDR2 comprises the amino acid sequence of SEQ ID NO: 936; and the anti-C3 LCDR3 comprises the amino acid sequence of SEQ ID NO: 945. In some embodiments, the anti-C3 LCDR1 comprises the amino acid sequence of SEQ ID NO: 928; the anti-C3 LCDR2 comprises the amino acid sequence of SEQ ID NO: 937; and the anti-C3 LCDR3 comprises the amino acid sequence of SEQ ID NO: 946. In some embodiments, the anti-C3 LCDR1 comprises the amino acid sequence of SEQ ID NO: 929; the anti-C3 LCDR2 comprises the amino acid sequence of SEQ ID NO: 938; and the anti-C3 LCDR3 comprises the amino acid sequence of SEQ ID NO: 947. In some embodiments, the anti-C3 LCDR1 comprises the amino acid sequence of SEQ ID NO: 949; the anti-C3 LCDR2 comprises the amino acid sequence of SEQ ID NO: 984; and the anti-C3 LCDR3 comprises the amino acid sequence of SEQ ID NO: 1019. In some embodiments, the anti-C3 LCDR1 comprises the amino acid sequence of SEQ ID NO: 950; the anti-C3 LCDR2 comprises the amino acid sequence of SEQ ID NO: 985; and the anti-C3 LCDR3 comprises the amino acid sequence of SEQ ID NO: 1020. In some embodiments, the anti-C3 LCDR1 comprises the amino acid sequence of SEQ ID NO: 951; the anti-C3 LCDR2 comprises the amino acid sequence of SEQ ID NO: 986; and the anti-C3 LCDR3 comprises the amino acid sequence of SEQ ID NO: 1021. In some embodiments, the anti-C3 LCDR1 comprises the amino acid sequence of SEQ ID NO: 952; the anti-C3 LCDR2 comprises the amino acid sequence of SEQ ID NO: 987; and the anti-C3 LCDR3 comprises the amino acid sequence of SEQ ID NO: 1022. In some embodiments, the anti-C3 LCDR1 comprises the amino acid sequence of SEQ ID NO: 953; the anti-C3 LCDR2 comprises the amino acid sequence of SEQ ID NO: 988; and the anti-C3 LCDR3 comprises the amino acid sequence of SEQ ID NO: 1023. In some embodiments, the anti-C3 LCDR1 comprises the amino acid sequence of SEQ ID NO: 954; the anti-C3 LCDR2 comprises the amino acid sequence of SEQ ID NO: 989; and the anti-C3 LCDR3 comprises the amino acid sequence of SEQ ID NO: 1024. In some embodiments, the anti-C3 LCDR1 comprises the amino acid sequence of SEQ ID NO: 955; the anti-C3 LCDR2 comprises the amino acid sequence of SEQ ID NO: 990; and the anti-C3 LCDR3 comprises the amino acid sequence of SEQ ID NO: 1025. In some embodiments, the anti-C3 LCDR1 comprises the amino acid sequence of SEQ ID NO: 956; the anti-C3 LCDR2 comprises the amino acid sequence of SEQ ID NO: 991; and the anti-C3 LCDR3 comprises the amino acid sequence of SEQ ID NO: 1026. In some embodiments, the anti-C3 LCDR1 comprises the amino acid sequence of SEQ ID NO: 957; the anti-C3 LCDR2 comprises the amino acid sequence of SEQ ID NO: 992; and the anti-C3 LCDR3 comprises the amino acid sequence of SEQ ID NO: 1027. In some embodiments, the anti-C3 LCDR1 comprises the amino acid sequence of SEQ ID NO: 958; the anti-C3 LCDR2 comprises the amino acid sequence of SEQ ID NO: 993; and the anti-C3 LCDR3 comprises the amino acid sequence of SEQ ID NO: 1028. In some embodiments, the anti-C3 LCDR1 comprises the amino acid sequence of SEQ ID NO: 959; the anti-C3 LCDR2 comprises the amino acid sequence of SEQ ID NO: 994; and the anti-C3 LCDR3 comprises the amino acid sequence of SEQ ID NO: 1029. In some embodiments, the anti-C3 LCDR1 comprises the amino acid sequence of SEQ ID NO: 960; the anti-C3 LCDR2 comprises the amino acid sequence of SEQ ID NO: 995; and the anti-C3 LCDR3 comprises the amino acid sequence of SEQ ID NO: 1030. In some embodiments, the anti-C3 LCDR1 comprises the amino acid sequence of SEQ ID NO: 961; the anti-C3 LCDR2 comprises the amino acid sequence of SEQ ID NO: 996; and the anti-C3 LCDR3 comprises the amino acid sequence of SEQ ID NO: 1031. In some embodiments, the anti-C3 LCDR1 comprises the amino acid sequence of SEQ ID NO: 962; the anti-C3 LCDR2 comprises the amino acid sequence of SEQ ID NO: 997; and the anti-C3 LCDR3 comprises the amino acid sequence of SEQ ID NO: 1032. In some embodiments, the anti-C3 LCDR1 comprises the amino acid sequence of SEQ ID NO: 963; the anti-C3 LCDR2 comprises the amino acid sequence of SEQ ID NO: 998; and the anti-C3 LCDR3 comprises the amino acid sequence of SEQ ID NO: 1033. In some embodiments, the anti-C3 LCDR1 comprises the amino acid sequence of SEQ ID NO: 964; the anti-C3 LCDR2 comprises the amino acid sequence of SEQ ID NO: 999; and the anti-C3 LCDR3 comprises the amino acid sequence of SEQ ID NO: 1034. In some embodiments, the anti-C3 LCDR1 comprises the amino acid sequence of SEQ ID NO: 965; the anti-C3 LCDR2 comprises the amino acid sequence of SEQ ID NO: 1000; and the anti-C3 LCDR3 comprises the amino acid sequence of SEQ ID NO: 1035. In some embodiments, the anti-C3 LCDR1 comprises the amino acid sequence of SEQ ID NO: 966; the anti-C3 LCDR2 comprises the amino acid sequence of SEQ ID NO: 1001; and the anti-C3 LCDR3 comprises the amino acid sequence of SEQ ID NO: 1036. In some embodiments, the anti-C3 LCDR1 comprises the amino acid sequence of SEQ ID NO: 967; the anti-C3 LCDR2 comprises the amino acid sequence of SEQ ID NO: 1002; and the anti-C3 LCDR3 comprises the amino acid sequence of SEQ ID NO: 1037. In some embodiments, the anti-C3 LCDR1 comprises the amino acid sequence of SEQ ID NO: 968; the anti-C3 LCDR2 comprises the amino acid sequence of SEQ ID NO: 1003; and the anti-C3 LCDR3 comprises the amino acid sequence of SEQ ID NO: 1038. In some embodiments, the anti-C3 LCDR1 comprises the amino acid sequence of SEQ ID NO: 969; the anti-C3 LCDR2 comprises the amino acid sequence of SEQ ID NO: 1004; and the anti-C3 LCDR3 comprises the amino acid sequence of SEQ ID NO: 1039. In some embodiments, the anti-C3 LCDR1 comprises the amino acid sequence of SEQ ID NO: 970; the anti-C3 LCDR2 comprises the amino acid sequence of SEQ ID NO: 1005; and the anti-C3 LCDR3 comprises the amino acid sequence of SEQ ID NO: 1040. In some embodiments, the anti-C3 LCDR1 comprises the amino acid sequence of SEQ ID NO: 971; the anti-C3 LCDR2 comprises the amino acid sequence of SEQ ID NO: 1006; and the anti-C3 LCDR3 comprises the amino acid sequence of SEQ ID NO: 1041. In some embodiments, the anti-C3 LCDR1 comprises the amino acid sequence of SEQ ID NO: 972; the anti-C3 LCDR2 comprises the amino acid sequence of SEQ ID NO: 1007; and the anti-C3 LCDR3 comprises the amino acid sequence of SEQ ID NO: 1042. In some embodiments, the anti-C3 LCDR1 comprises the amino acid sequence of SEQ ID NO: 973; the anti-C3 LCDR2 comprises the amino acid sequence of SEQ ID NO: 1008; and the anti-C3 LCDR3 comprises the amino acid sequence of SEQ ID NO: 1043. In some embodiments, the anti-C3 LCDR1 comprises the amino acid sequence of SEQ ID NO: 974; the anti-C3 LCDR2 comprises the amino acid sequence of SEQ ID NO: 1009; and the anti-C3 LCDR3 comprises the amino acid sequence of SEQ ID NO: 1044. In some embodiments, the anti-C3 LCDR1 comprises the amino acid sequence of SEQ ID NO: 975; the anti-C3 LCDR2 comprises the amino acid sequence of SEQ ID NO: 1010; and the anti-C3 LCDR3 comprises the amino acid sequence of SEQ ID NO: 1045. In some embodiments, the anti-C3 LCDR1 comprises the amino acid sequence of SEQ ID NO: 976; the anti-C3 LCDR2 comprises the amino acid sequence of SEQ ID NO: 1011; and the anti-C3 LCDR3 comprises the amino acid sequence of SEQ ID NO: 1046. In some embodiments, the anti-C3 LCDR1 comprises the amino acid sequence of SEQ ID NO: 977; the anti-C3 LCDR2 comprises the amino acid sequence of SEQ ID NO: 1012; and the anti-C3 LCDR3 comprises the amino acid sequence of SEQ ID NO: 1047. In some embodiments, the anti-C3 LCDR1 comprises the amino acid sequence of SEQ ID NO: 978; the anti-C3 LCDR2 comprises the amino acid sequence of SEQ ID NO: 1013; and the anti-C3 LCDR3 comprises the amino acid sequence of SEQ ID NO: 1048. In some embodiments, the anti-C3 LCDR1 comprises the amino acid sequence of SEQ ID NO: 979; the anti-C3 LCDR2 comprises the amino acid sequence of SEQ ID NO: 1014; and the anti-C3 LCDR3 comprises the amino acid sequence of SEQ ID NO: 1049. In some embodiments, the anti-C3 LCDR1 comprises the amino acid sequence of SEQ ID NO: 980; the anti-C3 LCDR2 comprises the amino acid sequence of SEQ ID NO: 1015; and the anti-C3 LCDR3 comprises the amino acid sequence of SEQ ID NO: 1050. In some embodiments, the anti-C3 LCDR1 comprises the amino acid sequence of SEQ ID NO: 981; the anti-C3 LCDR2 comprises the amino acid sequence of SEQ ID NO: 1016; and the anti-C3 LCDR3 comprises the amino acid sequence of SEQ ID NO: 1051. In some embodiments, the anti-C3 LCDR1 comprises the amino acid sequence of SEQ ID NO: 982; the anti-C3 LCDR2 comprises the amino acid sequence of SEQ ID NO: 1017; and the anti-C3 LCDR3 comprises the amino acid sequence of SEQ ID NO: 1052.

[0103] In some embodiments, the bispecific antibodies of the present disclosure include an anti-C3 antigen-binding site comprises a VH and a VL that are at least 90% identical to a VH and a VL from any anti-C3 antibody. In some embodiments, a bispecific antibody of the present disclosure includes an anti-CFHR4 antigen-binding site, or an antigen-binding fragment thereof, and an anti-C3 antigen-binding site, or an antigen-binding fragment thereof. Such bispecific antibodies can be used to target the complement activation pathway from two different mechanisms, and thus provide additional therapeutic benefits. In some embodiments, the second anti-C3 antigen-binding site comprises a VH and a VL that are at least 90% identical to a VH and a VL from an NGM621 antibody (or an antigen-binding fragment thereof). NGM621 is a humanized IgG1 monoclonal antibody engineered to inhibit complement C3. In some embodiments, the second anti-C3 antigen-binding site comprises a VH and a VL that are at least 90% identical to a VH and a VL from an anti-C3 antibody, or an antigen-binding fragment thereof, disclosed in U.S. Pat. No. 9,815,890 or disclosed in PCT Application No. PCT/US2019/025123, both of which are incorporated herein by reference.

[0104] In other embodiments, the anti-CFHR4 antigen-binding site can be any of the anti-CFHR4 antibodies of the present disclosure, and the anti-C3 arm can be any C3 antagonist, including but not limited to, POT-4 (AL-78898A) and APL-2. POT-4 (AL-78898A) is a synthetic cyclic peptide conjugated to a PEG polymer that binds specifically to C3 (e.g., a compstatin analog); it was the first complement inhibitor to be tested in the treatment of macular degeneration. APL-2 (pegcetacoplan) is a symmetrical molecule comprised of two identical pentadecapeptides covalently bound to the ends of a linear 40-kDa polyethylene glycol molecule; it binds both C3 and C3b.

[0105] In some embodiments, the second anti-C3 antigen-binding site comprises a VH and a VL that are at least 90% identical to a VH and a VL from any antibody that binds Complement Component 3b (C3b). In some embodiments, the second anti-C3b antigen-binding site comprises a VH and a VL that are at least 90% identical to a VH and a VL from an S77 antibody (or an antigen-binding fragment thereof). S77 is an antibody that selectively recognizes C3b but not the non-activated molecule C3. In some embodiments, the second anti-C3 antigen-binding site comprises a VH and a VL that are at least 90% identical to a VH and a VL from an anti-C3 antibody, or an antigen-binding fragment thereof, disclosed in U.S. Pat. No. 8,012,473 or disclosed in PCT Application No. PCT/US2008/065771, both of which are incorporated herein by reference (see also, Katschke, K. J. et al., Journal of Biological Chemistry, 2009, vol. 284 (16): 10473-10479).

### Anti-C3/Anti-VEGF Bispecific Antibodies

[0106] Embodiments of the present disclosure relate to the treatment and/or prevention of age-related macular degeneration (AMD), including both neovascular AMD (“wet” AMD) and non-neovascular AMD (“dry” AMD), as well as advanced forms of non-neovascular AMD (geographic atrophy or GA). In some embodiments, the present disclosure provides novel therapeutic bispecific antibodies that target components of the alternative pathway of the complement activation system and the Vascular Endothelial Growth Factor (VEGF) signaling pathway to treat AMD. As described further herein, embodiments of the present disclosure also include a bispecific antibody comprising an antigen-binding site directed against CFHR4 or C3, and an antigen-binding site directed against VEGF. In accordance with these embodiments, the anti-CFHR4 antigen-binding site comprises a heavy chain variable region (VH) comprising complementarity determining regions (CDRs) HCDR1, HCDR2, and HCDR3 from one or more of SEQ ID NOs: 260-265, 284-293, 324-334, and 368-380; and a light chain variable region (VL) comprising complementarity determining regions (CDRs) LCDR1, LCDR2, and LCDR3 from one or more of SEQ ID NOs: 272-277, 304-313, 346-356, and 394-406; and the second anti-VEGF antigen-binding site comprises a VH and a VL that are at least 90% identical to a VH and a VL from an anti-VEGF antibody. In some embodiments, the anti-C3 antigen binding site comprises a heavy chain variable region (VH) comprising complementarity determining regions (CDRs) HCDR1, HCDR2, and HCDR3 from one or more of SEQ ID NOs: 1127-1200; and a light chain variable region (VL) comprising complementarity determining regions (CDRs) LCDR1, LCDR2, and LCDR3 from one or more of SEQ ID NOs: 1275-1348; and the second anti-VEGF antigen-binding site comprises a VH and a VL that are at least 90% identical to a VH and a VL from an anti-VEGF antibody.

[0107] In some embodiments, the second anti-VEGF antigen-binding site comprises a VH and a VL that are at least 90% identical to a VH and a VL from any anti-VEGF antibody. In some embodiments, a bispecific antibody of the present disclosure includes an anti-CFHR4 antigen-binding site, or an antigen-binding fragment thereof, and an anti-VEGF antigen-binding site, or an antigen-binding fragment thereof. Such bispecific antibodies can be used to treat AMD via inhibition of the complement activation pathway and inhibition of the VEGF signaling pathway, and thus provide additional therapeutic benefits. The VEGF antigen-binding site can be selected from any anti-VEGF antibody, including but not limited to, Bevacizumab, Ranibizumab, Brolucizumab, Faricimab, and Vanucizumab, or an antigen-binding fragment thereof.

[0108] In some embodiments, the second anti-VEGF antigen-binding site comprises a VH and a VL that are at least 90% identical to a VH and a VL from Bevacizumab (or an antigen-binding fragment thereof). Bevacizumab (Avastin) is an anti-VEGF human monoclonal antibody. In some embodiments, the second anti-VEGF antigen-binding site comprises a VH and a VL that are at least 90% identical to a VH and a VL from an anti-VEGF antibody, or an antigen-binding fragment thereof, disclosed in EP Patent Nos. EP0666868 and EP0817648, or disclosed in PCT Application No. PCT/US1992/009218, all of which are incorporated herein by reference.

[0109] In some embodiments, the second anti-VEGF antigen-binding site comprises a VH and a VL that are at least 90% identical to a VH and a VL from Ranibizumab (or an antigen-binding fragment thereof). Ranibizumab (Lucentis) is a Fab fragment derived from Bevacizumab. In some embodiments, the second anti-VEGF antigen-binding site comprises a VH and a VL that are at least 90% identical to a VH and a VL from an anti-VEGF antibody, or an antigen-binding fragment thereof, disclosed in U.S. patent application Ser. No. 11/840,279, or disclosed in PCT Application No. PCT/EP2007/007276, both of which are incorporated herein by reference.

[0110] In some embodiments, the second anti-VEGF antigen-binding site comprises a VH and a VL that are at least 90% identical to a VH and a VL from Brolucizumab (or an antigen-binding fragment thereof). Brolucizumab (RTH258; Beovu) is a humanized scFv that is an inhibitor of VEGF-A. In some embodiments, the second anti-VEGF antigen-binding site comprises a VH and a VL that are at least 90% identical to a VH and a VL from an anti-VEGF antibody, or an antigen-binding fragment thereof, disclosed in PCT Application No. PCT/US2015/059575, or disclosed in PCT Application No. PCT/US2015/059571, both of which are incorporated herein by reference.

[0111] In some embodiments, the second anti-VEGF antigen-binding site comprises a VH and a VL that are at least 90% identical to a VH and a VL from Faricimab (or an antigen-binding fragment thereof). Faricimab (RG7716) is a bispecific, monoclonal antibody specifically designed for the eye that simultaneously binds to and neutralizes both Angiopoietin-2 (Ang-2) and vascular endothelial growth factor A (VEGF-A). In some embodiments, the second anti-VEGF antigen-binding site comprises a VH and a VL that are at least 90% identical to a VH and a VL from an anti-VEGF antibody, or an antigen-binding fragment thereof, disclosed in U.S. Pat. No. 10,072,075, or disclosed in PCT Application No. PCT/US2016/053454, both of which are incorporated herein by reference.

[0112] In some embodiments, the second anti-VEGF antigen-binding site comprises a VH and a VL that are at least 90% identical to a VH and a VL from Vanucizumab (or an antigen-binding fragment thereof). Vanucizumab (RG7721) is a humanized bispecific, monoclonal antibody designed for the treatment of cancer composed of two different heavy chains and two different light chains (one arm binds Ang2 and the other binds VEGF (bevacizumab)). In some embodiments, the second anti-VEGF antigen-binding site comprises a VH and a VL that are at least 90% identical to a VH and a VL from an anti-VEGF antibody, or an antigen-binding fragment thereof, disclosed in U.S. Pat. No. 8,945,552, or disclosed in PCT Application No. PCT/EP2011/054504, both of which are incorporated herein by reference.

[0113] In other embodiments, a bispecific antibody of the present disclosure includes an anti-CFHR4 antigen binding site or an anti-C3 antigen binding site (or antigen binding fragments thereof), and an anti-VEGF antigen binding site (or an antigen binding fragment thereof) from any VEGF antagonist, including but not limited to, anti-VEGF antibodies (e.g., bevacizumab, sevacizumab, and ranibizumab), anti-VEGFR2 antibodies and related molecules (e.g., ramucirumab, tanibirumab, aflibercept), anti-VEGFR1 antibodies and related molecules (e.g., icrucumab, aflibercept (VEGF Trap-Eye; EYLEA®), and ziv-aflibercept (VEGF Trap; ZALTRAP®)), anti-VEGF arms of VEGF bispecific antibodies (e.g., MP-0250, vanucizumab (VEGF-ANG2)), including anti-VEGF, anti-VEGFR1, and anti-VEGFR2 arms.

### Multispecific Antibodies

[0114] The amino acid sequences of the bispecific antibodies of the present disclosure are not limited to the specific amino acid sequences described herein. Indeed, an anti-CFHR4/anti-C3 bispecific antibody, an anti-CFHR4/anti-VEGF bispecific antibody, and an anti-C3/anti-VEGF bispecific antibody, or antigen-binding fragments thereof, can comprise any heavy chain polypeptide or light chain polypeptide that competes with the various antigen-binding sites of these antibodies. Antibody competition can be assayed using routine peptide competition assays such as, for example, ELISA, Western blot, or immunohistochemistry methods (see, e.g., U.S. Pat. Nos. 4,828,981 and 8,568,992; and Braitbard et al., Proteome Sci., 4:12 (2006)).

[0115] A bispecific antibody of the present disclosure may be a whole antibody, or an antigen-binding fragment of a whole antibody. As defined herein, antigen-binding antibody fragments encompassed by the present disclosure include, but are not limited to, F(ab′)2, Fab′, Fab, Fv, scFv, dsFv, dAb, and single chain binding polypeptides. Antibody fragments and their therapeutic utility are further described in, e.g., Nelson, A. L., MAbs. 2010 January-February; 2 (1): 77-83; Joosten et al., Microbial Cell Factories volume 2, Article number: 1 (2003); and Bates A, Power CA., Antibodies (Basel). 2019; 8 (2): 28; doi: 10.3390/antib8020028). In some embodiments, the anti-CFHR4, the anti-C3, and/or the anti-VEGF antigen-binding fragments are a single-chain variable fragments (scFv), which are engineered antibodies generated by the fusion of the heavy (VH) and light chains (VL) of immunoglobulins through a short polypeptide linker. Single chain variable domain (Fv) fragments (scFv) are used in the art in a variety of clinical and therapeutic applications, primarily due to their improved pharmacokinetic properties as compared to the parent monoclonal antibodies and the relative ease of producing them in large quantities at low cost (Monnier et al., Antibodies 2013, 2 (2), 193-208; doi.org/10.3390/antib2020193; Safdari et al., Mol Med. 2016; 22:258-270; and Lu, R., Hwang, Y., Liu, I. et al. Development of therapeutic antibodies for the treatment of diseases. J Biomed Sci 27, 1 (2020). https://doi.org/10.1186/s12929-019-0592-z).

[0116] The bispecific antibodies of the present disclosure may be a diabody. Diabodies are antibody fragments with two antigen-binding sites that may be bivalent or bispecific. See, for example, EP 404,097; WO 1993/01161; Hudson et al., Nat. Med. 9:129-134 (2003); and Hollinger et al., Proc. Natl. Acad. Sci. USA 90:6444-6448 (1993). Triabodies and tetrabodies are also described in Hudson et al., Nat. Med. 9:129-134 (2003). An anti-CFHR4, anti-C3, or anti-VEGF antibody of the present disclosure may be a single-domain antibody (also referred to as a nanobody). Single-domain antibodies are antibody fragments comprising all or a portion of the heavy chain variable domain or all or a portion of the light chain variable domain of an antibody. In certain embodiments, a single-domain antibody is a human single-domain antibody (Domantis, Inc., Waltham, Mass.; see, e.g., U.S. Pat. No. 6,248,516 B1). Antibody fragments can be made by various techniques, including but not limited to proteolytic digestion of an intact antibody as well as production by recombinant host cells (e.g., E. coli or phage), as described herein.

[0117] In other embodiments, a bispecific antibody of the present disclosure is a whole antibody. As defined herein, a whole antibody comprises two identical copies of a heavy (H) chain polypeptide and two identical copies of a light (L) chain polypeptide. Each of the heavy chains contains one N-terminal variable (VH) region and three C-terminal constant (C_{H1}, C_{H2}, and C_{H3}) regions, and each light chain contains one N-terminal variable (V_{L}) region and one C-terminal constant (C_{L}). The heavy chain C-terminal constant region contains the fragment crystallizable (Fc) domain, which determines antibody class and is responsible for humoral and cellular effector functions. Antibodies are divided into five major classes (or “isotypes”), IgG, IgM, IgA, IgD and IgE, which differ in their function in the immune system. IgGs are the most abundant immunoglobulins in the blood, representing 60% of total serum antibodies in humans. IgG antibodies may be subclassified as IgG1, IgG2, IgG3, and IgG4, named in order of their abundance in serum (IgG1 being the most abundant) (Vidarsson et al., Frontiers in Immunology. 5:520 (2014)). A whole bispecific antibody described herein (e.g., an anti-CFHR4/anti-C3 bispecific antibody, an anti-CFHR4/anti-VEGF bispecific antibody, and an anti-C3/anti-VEGF bispecific antibody) may be of any suitable class and/or subclass. In some embodiments, the antibody is of class IgG (e.g., IgG1, IgG2, IgG3, or IgG4). For example, the antibody may be an IgG1 antibody.

[0118] As discussed above, the Fc domain mediates several effector functions of antibodies, such as binding to receptors on target cells and complement fixation (triggering effector functions that eliminate the antigen). In some embodiments, the Fc domain may be modified or engineered to alter its effector functions. For example, Fc domains may be modified to improve antibody-dependent cellular cytotoxicity (ADCC) and antibody-dependent cellular phagocytosis (ADCP), and to control serum half-life. In some embodiments, the Fc domain of the anti-CFHR4 antibody may be engineered to modulate affinity for an Fc receptor, such as Fcγ receptors (FcγRs) and the neonatal Fc receptor (FcRn). Indeed, optimization of the interactions between antibodies and FcγRs has emerged as a promising approach for enhancing the activity of therapeutic antibodies for the treatment of various diseases (Mimoto et al., Curr. Pharm. Biotechnol. 17, 1298-1314 (2016); Lazar et al., Proc. Natl Acad. Sci. USA 103, 4005-4010 (2006); Richards et al., Mol. Cancer Ther. 7, 2517-2527 (2008); Nordstrom et al., Breast Cancer Res. 13, R123 (2011); and Kang, T. H., Jung, S. T., Exp Mol Med 51, 1-9 (2019)). The Fc domain also may be modified to improve serum half-life, e.g., by engineering IgG Fc for higher FcRn binding (Zalevsky et al., Nat. Biotechnol. 28, 157-159 (2010); and Dall'Acqua et al., J. Immunol. 169, 5171-5180 (2002)). In other embodiments, the Fc domain may be modified to create monovalency or antibody bispecificity for improving therapeutic potency. For example, an Fc domain may be generated that does not form a homodimer but remains as a soluble monomer, mFc, that exhibits high affinity for FcγRI but no detectable binding to FcγRIIIa. In other embodiments, a heterodimeric Fc domain may be generated to obtain bispecific properties for antigen binding to circumvent homodimer formation. Engineered Fc domains may be generated by inducing point mutations or by modifying glycosylation of the Fc domain (Saunders, K. O., Front Immunol. 2019; 10:1296; Kelley, R. F., Meng, Y. G., Liu et al., J Biol Chem. 2014; 289:3571-90; Monnet et al., MAbs. 2014; 6:422-36; Li et al., Proc Natl Acad Sci USA. 2017; 114:3485-90; and Lin et al., Proc Natl Acad Sci USA. 2015; 112:10611-6; Kang and Jung, supra).

[0119] As described above, the bispecific antibodies of the present disclosure (e.g., an anti-CFHR4/anti-C3 bispecific antibody, an anti-CFHR4/anti-VEGF bispecific antibody, and an anti-C3/anti-VEGF bispecific antibody) can be a monoclonal antibody, a human antibody, a humanized antibody, and/or a chimeric antibody. In some embodiments, the antibody is a fragment selected from the group consisting of Fab, Fab-C, Fab′-SH, Fv, scFv, and (Fab′)₂ fragments. In some embodiments, the bispecific antibodies of the present disclosure comprise two or more single-domain antibodies that form a bivalent antibody, a trivalent antibody, or a tetravalent antibody that recognizes different epitopes on the same or different antigens.

[0120] In some embodiments, the bispecific antibodies of the present disclosure (e.g., an anti-CFHR4/anti-C3 bispecific antibody, an anti-CFHR4/anti-VEGF bispecific antibody, and an anti-C3/anti-VEGF bispecific antibody) are chimeric antibodies. Certain chimeric antibodies are described, for example, in U.S. Pat. No. 4,816,567; and Morrison et al., Proc. Natl. Acad. Sci. USA. 81:6851-6855 (1984). In one example, a chimeric antibody comprises a non-human variable region (e.g., a variable domain derived from a mouse, rat, hamster, rabbit, or non-human primate, such as a monkey) and a human constant domain. In a further example, a chimeric antibody is a “class switched” antibody in which the class or subclass has been changed from that of the parent antibody. Chimeric antibodies include antigen-binding fragments thereof.

[0121] In certain embodiments, a chimeric antibody is a humanized antibody. Typically, a non-human antibody is humanized to reduce immunogenicity to humans, while retaining the specificity and affinity of the parental non-human antibody. Generally, a humanized antibody comprises one or more variable domains in which HVRs, for example, CDRs, (or portions thereof) are derived from a non-human antibody, and FRs (or portions thereof) are derived from human antibody sequences. A humanized antibody optionally will also comprise at least a portion of a human constant region. In some embodiments, some FR residues in a humanized antibody are substituted with corresponding residues from a non-human antibody (e.g., the antibody from which the HVR residues are derived), e.g., to restore or improve antibody specificity or affinity.

[0122] Humanized antibodies and methods of making them are reviewed, for example, in Almagro and Fransson, Front. Biosci. 13:1619-1633 (2008), and are further described, for example, in Riechmann et al., Nature 332:323-329 (1988); Queen et al., Proc. Nat'l Acad. Sci. USA 86:10029-10033 (1989); U.S. Pat. Nos. 5,821,337, 7,527,791, 6,982,321, and 7,087,409; Kashmiri et al., Methods 36:25-34 (2005) (describing specificity determining region (SDR) grafting); Padlan, Mol. Immunol. 28:489-498 (1991) (describing “resurfacing”); Dall'Acqua et al., Methods 36:43-60 (2005) (describing “FR shuffling”); and Osbourn et al., Methods 36:61-68 (2005) and Klimka et al., Br. J. Cancer, 83:252-260 (2000) (describing the “guided selection” approach to FR shuffling).

[0123] In accordance with the above embodiments, the bispecific antibodies of the present disclosure (e.g., an anti-CFHR4/anti-C3 bispecific antibody, an anti-CFHR4/anti-VEGF bispecific antibody, and an anti-C3/anti-VEGF bispecific antibody) can be made into bivalent, trivalent, or tetravalent formats. For example, a bispecific antibody of the present disclosure can be a bivalent, bispecific antibody with heteromeric heavy chains (e.g., Triomab, knobs-into-holes (KIH), Duobody, etc). A bispecific antibody of the present disclosure can be a tetravalent multispecific antibody comprised of IgGs with other binding domains fused to either the N- or C-termini of either the heavy or light chains (e.g., dual variable domain [DVD], IgG-scFv fusion, Mabtyrin (IgG with non-antibody binding scaffold “centyrin” fused to C-terminal end of heavy chains). A bispecific antibody of the present disclosure can be comprised of IgGs to which additional antigen combining sites have been added within the structure (e.g., two-in-one antibodies, MAT “Modular Antibody Technology” platform from F-Star). A bispecific antibody of the present disclosure can be an engineered antibody fragment linked by short peptide linkers which can be made into bivalent, trivalent, or tetravalent formats addressing two to three targets (e.g., bispecific T-cell engager (BiTE), Nanobody platform, dual-affinity re-targeting (DART) antibodies, “tandem antibody” structures (TandAbs)). And a bispecific antibody of the present disclosure can be comprised of chemically coupled IgGs.

### Polypeptides and Expression Vectors

[0124] Embodiments of the present disclosure also include a polynucleotide encoding any of the bispecific antibodies of the present disclosure (e.g., an anti-CFHR4/anti-C3 bispecific antibody, an anti-CFHR4/anti-VEGF bispecific antibody, and an anti-C3/anti-VEGF bispecific antibody). In accordance with these embodiments, the present disclosure includes an expression vector comprising any of the polynucleotides encoding a bispecific antibody of the present disclosure. In some embodiments, the expression vector is suitable for manufacturing a bispecific antibody of the present disclosure for delivery of the antibody to a subject. In certain embodiments, the nucleic acid sequence is in the form of a vector. The vector can be, for example, a plasmid, episome, cosmid, viral vector (e.g., retroviral or adenoviral), or phage. Suitable vectors and methods of vector preparation are well known in the art (see, e.g., Sambrook et al., Molecular Cloning, a Laboratory Manual, 4th edition, Cold Spring Harbor Press, Cold Spring Harbor, N. Y. (2012), and Ausubel et al., Current Protocols in Molecular Biology, Greene Publishing Associates and John Wiley & Sons, New York, N.Y. (1994)).

[0125] In addition to the nucleic acid encoding an anti-CFHR4 antibody or antigen-binding fragment thereof, the vector desirably comprises expression control sequences, such as promoters, enhancers, polyadenylation signals, transcription terminators, internal ribosome entry sites (IRES), and the like, that provide for the expression of the antibody-encoding nucleic sequence in a host cell. Exemplary expression control sequences are known in the art and described in, for example, Goeddel, Gene Expression Technology: Methods in Enzymology, Vol. 185, Academic Press, San Diego, Calif. (1990).

[0126] A vector comprising a nucleic acid sequence encoding a bispecific antibody of the present disclosure (e.g., an anti-CFHR4/anti-C3 bispecific antibody, an anti-CFHR4/anti-VEGF bispecific antibody, and an anti-C3/anti-VEGF bispecific antibody), or an antigen-binding fragment thereof, may be introduced into a host cell that is capable of expressing the polypeptides encoded thereby, including any suitable prokaryotic or eukaryotic cell. Examples of suitable prokaryotic cells include, but are not limited to, cells from the genera Bacillus (such as Bacillus subtilis and Bacillus brevis), Escherichia (such as E. coli), Pseudomonas, Streptomyces, Salmonella, and Erwinia. Particularly useful prokaryotic cells include the various strains of Escherichia coli (e.g., K12, HB101 (ATCC No. 33694), DH5a, DH10, MC1061 (ATCC No. 53338), and CC102). Suitable eukaryotic cells are known in the art and include, for example, yeast cells, insect cells, and mammalian cells. Examples of suitable yeast cells include those from the genera Hansenula, Kluyveromyces, Pichia, Rhinosporidium, Saccharomyces, and Schizosaccharomyces. Suitable insect cells include Sf-9 and HIS cells (Invitrogen, Carlsbad, Calif.) and are described in, for example, Kitts et al., Biotechniques, 14:810-817 (1993); Lucklow, Curr. Opin. Biotechnol., 4:564-572 (1993); and Lucklow et al., J. Virol., 67:4566-4579 (1993). Examples of suitable mammalian cells include, but are not limited to, Chinese hamster ovary cells (CHO) (ATCC No. CCL61), CHO DHFR-cells (Urlaub et al., Proc. Natl. Acad. Sci. USA, 97:4216-4220 (1980)), human embryonic kidney (HEK) 293 or 293T cells (ATCC No. CRL1573), and 3T3 cells (ATCC No. CCL92). Other suitable mammalian cell lines are the monkey COS-1 (ATCC No. CRL1650) and COS-7 cell lines (ATCC No. CRL1651), as well as the CV-1 cell line (ATCC No. CCL70). Further exemplary mammalian host cells include primate cell lines and rodent cell lines, including transformed cell lines. Normal diploid cells, cell strains derived from in vitro culture of primary tissue, as well as primary explants also are suitable. Other suitable mammalian cell lines include, but are not limited to, mouse neuroblastoma N2A cells, HeLa, mouse L-929 cells, and BHK or Hak hamster cell lines, all of which are available from the ATCC. Methods for selecting suitable mammalian host cells and methods for transformation, culture, amplification, screening, and purification of such cells are well known in the art (see, e.g., Ausubel et al., eds., Short Protocols in Molecular Biology, 5th ed., John Wiley & Sons, Inc., Hoboken, N.J. (2002)). Preferably, the mammalian cell is a human cell.

[0127] In some embodiments, the vector can include means for attaching a detection moiety to a bispecific antibody of the present disclosure (e.g., an anti-CFHR4/anti-C3 bispecific antibody, an anti-CFHR4/anti-VEGF bispecific antibody, and an anti-C3/anti-VEGF bispecific antibody). In some embodiments, the vector can include means for attaching a purification moiety to a bispecific antibody of the present disclosure. Exemplary detection and/or purification moieties/tags that can be coupled to a bispecific antibody of the present disclosure includes, but is not limited to, hemagglutinin (HA), c-Myc, V5, DYKDDDDK, His tag (e.g., 6x-HIS), Glutathione S-Transferase (GST), Maltose Binding Protein (MBP), a fluorophore (e.g., Green Fluorescent Protein (GFP), Red Fluorescent Protein (RFP), mCherry, a chromophore, and/or a luminescent peptide (e.g., luciferase).

[0128] In some embodiments, the expression vector is suitable for use in gene therapy (e.g., an expression vector for delivering a polynucleotide encoding a bispecific antibody of the present disclosure to a subject). In some embodiments, the expression vector is a herpes simplex virus (HSV) vector, or a retrovirus vector. In some embodiments, the expression vector is an adeno-associated virus (AAV) vector, or comprises an AAV backbone. For example, AAV vectors have been designed, produced and used to mediate gene delivery in human subjects, including for therapeutic purposes. Typically, AAV vectors for use in gene transfer comprise a replication defective AAV genome lacking functional Rep and Cap coding viral sequences. Such replication defective AAV vectors more preferably lack most or all of the Rep and Cap coding sequences, and essentially retain one or two AAV ITR sequences and a packaging sequence. The defective genome is packaged in a viral particle, to form a defective, recombined AAV virus, also termed “AAV vector”. Methods of producing such AAV vectors have been disclosed in the literature, including using packaging cells, auxiliary viruses or plasmids, and/or baculovirus systems (Samulski et al., (1989) J. Virology 63, 3822; Xiao et al., (1998) J. Virology 72, 2224; Inoue et al., (1998) J. Virol. 72, 7024; WO98/22607; WO2005/072364). Methods of producing pseudotyped AAV vectors have also been reported (e.g., WO00/28004), as well as various modifications or formulations of AAV vectors, to reduce their immunogenicity upon in vivo administration (see e.g., WO01/23001; WOOO/73316; WO04/112727; WO05/005610; WO99/06562). AAV vectors may be prepared or derived from various serotypes of AAVs, which may be even mixed together or with other types of viruses to produce chimeric (e.g., pseudotyped) AAV viruses. Examples of tAAVs are human AAV4 vectors, human AAV7 vectors, human AAV9 vectors, human AAV10 vectors, or bovine AAV vectors. The AAV vector may be derived from a single AAV serotype or comprise sequences or components originating from at least two distinct AAV serotypes (pseudotyped AAV vector), e.g., an AAV vector comprising an AAV genome derived from one AAV serotype (for example AAV9), and a capsid derived at least in part from a distinct AAV serotype. An AAV vector, as used herein, is a vector which comprises at least one component part derivable from an adeno-associated virus. Preferably, that component part is involved in the biological mechanisms by which the vector infects or transduces target cells and expresses an anti-CFHR4 antibody of the present disclosure (e.g., ocular delivery/expression).

[0129] In other embodiments, the expression vector is a lentiviral vector (LV), or comprises an LV backbone. Lentiviruses are part of a larger group of retroviruses. A detailed list of lentiviruses may be found in Coffin et al (1997) “Retroviruses” Cold Spring Harbour Laboratory Press Eds: J M Coffin, SM Hughes, HE Varmus pp 758-763). For example, lentiviruses can be divided into primate and non-primate groups. Examples of primate lentiviruses include but are not limited to the human immunodeficiency virus (HIV), the causative agent of human auto immunodeficiency syndrome (AIDS), and the simian immunodeficiency virus (SIV). The non-primate lentiviral group includes the prototype “slow virus” visna/maedi virus (VMV), as well as the related caprine arthritis-encephalitis virus (CAEV), equine infectious anaemia virus (EIAV), feline immunodeficiency virus (FIV), Maedi visna virus (MVV) and bovine immunodeficiency virus (BIV). In one embodiment, the lentiviral vector is derived from HIV-1, HIV-2, SIV, FIV, BIV, EIAV, CAEV or Visna lentivirus. The lentivirus family differs from retroviruses in that lentiviruses have the capability to infect both dividing and non-dividing cells (Lewis et al (1992) EM BO J 11 (8): 3053-3058 and Lewis and Emerman (1994) J Virol 68 (1): 510-516). In contrast, other retroviruses, such as MLV, are unable to infect non-dividing or slowly dividing cells such as those that make up, for example, muscle, brain, lung and liver tissue. A lentiviral vector, as used herein, is a vector which comprises at least one component part derivable from a lentivirus. Preferably, that component part is involved in the biological mechanisms by which the vector infects or transduces target cells and expresses an anti-CFHR4 antibody of the present disclosure (e.g., ocular delivery/expression).

[0130] Additional compositions and method for ocular gene therapy can be found in, e.g., Bordet, T., and Behar-Cohen, F., “Ocular gene therapies in clinical practice: viral vectors and nonviral alternatives,” Drug Discovery Today, Volume 24, Issue 8, August 2019, Pages 1685-1693). In some embodiments, gene therapy platforms, methods, and compositions that can be used to deliver a bispecific antibody of the present disclosure to a subject (e.g., ocular delivery) includes the platforms, methods, and compositions disclosed in US20220025396, US20220011308, US20210371877, US20210363192, US20190078099, US20190038724, and U.S. Pat. No. 10,494,646B2, which are incorporated herein by reference. In other embodiments, gene therapy platforms, methods, and compositions that can be used to deliver a bispecific antibody of the present disclosure to a subject (e.g., ocular delivery) includes the platforms, methods, and compositions based on HMR59 (Hemera Biosciences), which through its protein product soluble CD59, blocks the membrane attack complex that forms during the terminal step in the complement cascade. HMR59 is designed to be administered as a single intraocular injection.

[0131] In accordance with these embodiments, the present disclosure also provides a method of administering ocular gene therapy to a subject in need thereof comprising injecting a pharmaceutical composition comprising an effective amount of an expression vector described herein (e.g., an expression vector comprising a polynucleotides encoding a bispecific antibody of the present disclosure). As described further below, the present disclosure also provides a method of treating AMD (wet and/or dry AMD) and/or GA comprising administering a pharmaceutical composition comprising an effective amount of an expression vector described herein (e.g., an expression vector comprising a polynucleotides encoding a bispecific antibody of the present disclosure). In some embodiments, administering the pharmaceutical composition treats at least one AMD symptom (wet and/or dry AMD symptom) and/or at least one GA symptom.

### Methods of Making Bispecific Antibodies

[0132] In general, there are more than 100 different bispecific antibody formats that have been produced due to the modular architecture of antibodies. These formats vary in many ways, including based on their molecular weight, the number of antigen-binding sites, the spatial relationship between different binding sites, the valency for each antigen, the ability to support secondary immune functions, and the pharmacokinetic half-life. Recombinant bispecific antibodies can be divided into two classes: bispecific formats with Fc regions, and bispecific formats without Fc regions. Bispecific antibodies with an Fc region retain Fc-mediated effector functions, such as CDC and ADCC. These formats roughly include “knob into hole” IgG, crossMab, ortho-Fab IgG, DVD-Ig, two in one IgG, IgG-scFv and scFv2-Fc.

[0133] Bispecific antibodies with no Fc lack Fc-mediated effector functions. However, the smaller size of such antibodies offers a better tumor tissue penetration over IgG-like formats. In this format, the variable domains of each parental monoclonal antibody and the linkers are cloned and linked to form a single-chain bispecific antibody. These bispecific antibodies represent many formats, including tandem scFvs, diabody format, single-chain diabodies, tandem diabodies (TandAbs), dual-affinity retargeting molecules (DARTs), dock-and-lock (DNL), and nanobodies.

[0134] A number of strategies have been developed to generate bispecific antibodies. Hybrid hybridoma (also referred to as quadroma) was the earliest technology used to produce bispecific antibodies. It's based on the somatic fusion of two different hybridoma cell lines expressing murine IgGs of desired specificities. However, the real percentage of functional bispecific antibody by a quadroma cell line is unpredictable and a laborious process is required to isolate the bispecific antibody from the side products. By using molecular cloning technology, bispecific IgG antibodies can be assembled from two different heavy and light chains expressed in the same producer cell. The production of bispecific antibodies requires at least two plasmids for heterodimerized heavy chains and one plasmid for a common light chain or two light-chain plasmids if two different light chains are used. Notably, expressing HC and LC on separate plasmids can be advantageous because the manipulation of the plasmid ratio is an easy and efficient approach to optimize protein assembly for desired products. Subsequently, a laborious and time-consuming process is typically needed to select the most desirable clonal cell lines from a heterogeneous stable transfectant pool for large-scale antibody production. Generally, methods of making bispecific antibodies that can be divided into three groups: chemical recombination, cell fusion, and genetic manipulation (Reichert, J. M, and Dhimolca, E., Drug Discov Today, 2012 September; 17 (17-18): 954-63). Recent reviews on the different strategies in constructing bispecific antibodies, with therapeutic application emphasis, include Wu, C., Drug News Perspect. 2009 October; 22 (8): 453-8; Gu, J., and Ghayur, T., Methods Enzymol. 2012; 502:25-41; and Kontermann, R., MAbs, March-April 2012; 4 (2): 182-97.

[0135] The bispecific antibodies of the present disclosure can be made using any method known in the art. One approach for single cell manufacturing of bispecific antibodies is to use antibodies that are based on the same light chain in combination with a minimal set of Fc mutations to drive heavy chain heterodimerization. The resulting bispecific antibodies can readily be purified from the two undesired byproducts. As used herein the term “common light chain” refers to an immunoglobulin light chain comprising a variable domain that can productively associate with multiple heavy chain variable domains to form a paratope with each heavy chain variable region that is capable of specifically binding the epitope bound by the antibody in which the heavy chain variable region was originally encountered. Various antibody heavy or light chains, or portions thereof, are referred to herein as being “related” to the corresponding chain or portion thereof of an enumerated or specifically identified antibody. This denotes that the chain or portion thereof has identical sequence to the corresponding chain or portion thereof of an enumerated or specifically identified antibody, save for specifically indicated modifications, such as amino acid substitutions, of which there may be none. As described further herein, the bispecific antibodies of the present disclosure can be generated using this “common light chain” approach, including using one or more light chains of an anti-CHFR4 antibody

### Compositions and Methods of Treatment

[0136] The bispecific antibodies of the present disclosure (e.g., an anti-CFHR4/anti-C3 bispecific antibody, an anti-CFHR4/anti-VEGF bispecific antibody, and an anti-C3/anti-VEGF bispecific antibody) can be administered as part of a pharmaceutical composition in a therapeutically effective amount to treat an eye disease (e.g., AMD or GA). In some embodiments, the composition is suitable for ocular administration. In some embodiments, ocular administration comprises injection into vitreous fluid. In some embodiments, ocular administration comprises delivering the antibody using a conjunctival insert, a contact lens, a gel, a nanoparticle, a mucoadhesive polymer, an ointment, a solution, a suspension, eye drops, and/or an implant (e.g., Susvimo™). Recent methods and formulations for ocular administration can be found in, e.g., Souto, E. B., et al. “Advanced Formulation Approaches for Ocular Drug Delivery: State-Of-The-Art and Recent Patents,” Pharmaceutics, 2019 September; 11 (9): 460).

[0137] In accordance with these embodiments, the methods include administering a pharmaceutical composition comprising a therapeutically effective amount of a bispecific antibody of the present disclosure (e.g., an anti-CFHR4/anti-C3 bispecific antibody, an anti-CFHR4/anti-VEGF bispecific antibody, and an anti-C3/anti-VEGF bispecific antibody). In some embodiments, the pharmaceutical composition is administered ocularly and treats at least one AMD symptom. In some embodiments, AMD comprises wet AMD. In some embodiments, AMD comprises dry AMD (e.g., GA). In some embodiments, the at least one AMD symptom comprises visual distortion, reduced central vision, blurred vision, and/or difficulty adapting to low light. In some embodiments, administering the pharmaceutical composition reduces complement activation in the subject's eye.

[0138] As used herein, the terms “treatment,” “treating,” and the like refer to obtaining a desired pharmacologic and/or physiologic effect. In some embodiments, the effect is therapeutic, i.e., the effect partially or completely cures a disease and/or adverse symptom attributable to the disease. To this end, the methods of the present disclosure comprise administering a “therapeutically effective amount” of a bispecific antibody, or composition comprising a bispecific antibody. A “therapeutically effective amount” refers to an amount effective, at dosages and for periods of time necessary, to achieve a desired therapeutic result. The therapeutically effective amount may vary according to factors such as the disease state, age, sex, and weight of the individual, and the ability of the monoclonal antibody to elicit a desired response in the individual. For example, a therapeutically effective amount of a bispecific antibody of the present disclosure is an amount which treats at least one AMD and/or GA symptom in a subject. In some embodiments, the pharmacologic and/or physiologic effect may be prophylactic, i.e., the effect completely or partially prevents a disease or symptom thereof. In this respect, the methods of the present disclosure comprise administering a “prophylactically effective amount” of a bispecific antibody or composition comprising a bispecific antibody. A “prophylactically effective amount” refers to an amount effective, at dosages and for periods of time necessary, to achieve a desired prophylactic result (e.g., prevention of AMD and/or GA onset).

[0139] A typical dose of a therapeutically effective amount of a bispecific antibody of the present disclosure (e.g., an anti-CFHR4/anti-C3 bispecific antibody, an anti-CFHR4/anti-VEGF bispecific antibody, and an anti-C3/anti-VEGF bispecific antibody) can range from, for example, about 0.0001 mg/dose to about 100 mg/dose for each eye to be treated. In some embodiments, a therapeutically effective amount of a bispecific antibody of the present disclosure can range from about 0.001 mg/dose to about 100 mg/dose, from about 0.01 mg/dose to about 100 mg/dose, from about 0.05 mg/dose to about 50 mg/dose, from about 0.1 mg/dose to about 10 mg/dose, from about 0.5 mg/dose to about 5 mg/dose, and from about 1 mg/dose to about 10 mg/dose. In some embodiments, a therapeutically effective concentration of a bispecific antibody of the present disclosure can range from, for example, about 0.0001 mg to about 100 mg of the antibody per milliliter of solution. In some embodiments, a therapeutically effective concentration of a bispecific antibody of the present disclosure can range from about 0.001 mg/ml to about 100 mg/ml, from about 0.01 mg/ml to about 100 mg/ml, from about 0.1 mg/ml to about 100 mg/ml, from about 1.0 mg/ml and about 100 mg/ml, from about 0.001 mg/ml and about 50 mg/ml, from about 0.01 mg/ml and about 50 mg/ml, from about 0.1 mg/ml and about 50 mg/ml, from about 0.1 mg/ml and about 25 mg/ml, from about 0.1 mg/ml and about 10 mg/ml, and from about 1.0 mg/ml and about 10 mg/ml. In some embodiments, a therapeutically effective dose of a bispecific antibody of the present disclosure can be, exactly or approximately, 0.1 mg, 0.2 mg, 0.25 mg, 0.3 mg, 0.35 mg, 0.4 mg, 0.45 mg, 0.5 mg, 0.55 mg, 0.6 mg, 0.65 mg, 0.7 mg, 0.75 mg, 0.8 mg, 0.85 mg, 0.9 mg, 0.95 mg, 1.0 mg, 2.0 mg, 3.0 mg, 4.0 mg, 5.0 mg, 10.0 mg, 15.0 mg, 20.0 mg, or 25.0 mg, or can fall within a range delimited by any two of the foregoing values. For example, in certain embodiments, a sustained release formulation, (e.g., an ocular implant) can be, exactly or approximately, 0.1 mg, 0.2 mg, 0.25 mg, 0.3 mg, 0.35 mg, 0.4 mg, 0.45 mg, 0.5 mg, 0.55 mg, 0.6 mg, 0.65 mg, 0.7 mg, 0.75 mg, 0.8 mg, 0.85 mg, 0.9 mg, 0.95 mg, 1.0 mg, 2.0 mg, 3.0 mg, 4.0 mg, 5.0 mg, 10.0 mg, 15.0 mg, 20.0 mg, or 25.0 mg of a bispecific antibody, or an amount that falls within a range delimited by any two of the foregoing values.

[0140] Therapeutic or prophylactic efficacy can be monitored by periodic assessment of treated patients. For repeated administrations over several days or longer, depending on the condition, the treatment is repeated until a desired suppression of disease symptoms occurs. However, other dosage regimens may be useful and are within the scope of the present disclosure. The desired dosage can be delivered by a single bolus administration of the composition, by multiple bolus administrations of the composition, or by continuous infusion administration of the composition. The composition comprising a bispecific antibody, or antigen-binding fragment thereof, can be administered to a mammal using standard administration techniques, including ocular, oral, intravenous, intraperitoneal, subcutaneous, pulmonary, transdermal, intramuscular, intranasal, buccal, sublingual, or suppository administration. The composition preferably is suitable for ocular administration.

[0141] In accordance with the compositions and methods of treatment described herein, embodiments of the present disclosure include bispecific antibodies that have enhanced half-life (e.g., after ocular administration), such that the bispecific antibody can be administered less often to a subject. In some embodiments, the antibody comprises a half-life extension moiety. In some embodiments, the half-life extension moiety comprises a polypeptide that can be coupled to a bispecific antibody of the present disclosure by any means known in the art (e.g., generation of a fusion protein). In some embodiments, the polypeptide that can be coupled to a bispecific antibody of the present disclosure is at least 20 amino acids in length and comprises any combination of G, A, S T, E, and P residues. In some embodiments, the half-life extension polypeptide is attached to the C-terminus or N-terminus of the antibody. In some embodiments, this is referred to as “XTENylation,” as described further in U.S. Pat. Nos. 8,933,197, 7,846,445, 7,855,279, 8,492,530, 9,938,331, 8,673,860, 9,371,369, 9,926,351, 10,961,287, 10,172,953, and 10,953,073.

[0142] The present disclosure also provides a composition comprising any of the bispecific antibodies or antigen-binding fragments thereof described herein (e.g., an anti-CFHR4/anti-C3 bispecific antibody, an anti-CFHR4/anti-VEGF bispecific antibody, and an anti-C3/anti-VEGF bispecific antibody). The composition desirably is a pharmaceutically acceptable (e.g., physiologically acceptable) composition, which comprises a carrier, preferably a pharmaceutically acceptable (e.g., physiologically acceptable) carrier, and the bispecific antibody or antigen-binding fragment thereof. Any suitable carrier can be used within the context of the present disclosure, and such carriers are well known in the art. For example, the composition may contain preservatives, such as, for example, methylparaben, propylparaben, sodium benzoate, and benzalkonium chloride. A mixture of two or more preservatives optionally may be used. In addition, buffering agents may be included in the composition. Suitable buffering agents include, for example, citric acid, sodium citrate, phosphoric acid, potassium phosphate, and various other acids and salts. A mixture of two or more buffering agents optionally may be used. Methods for preparing compositions for pharmaceutical use are known to those skilled in the art and are described in, for example, Remington: The Science and Practice of Pharmacy, Lippincott Williams & Wilkins; 21st ed. (May 1, 2005).

[0143] Once administered to a mammal (e.g., a human), the biological activity of the bispecific antibody, or antigen-binding fragment thereof, can be measured by any suitable method known in the art. For example, the biological activity can be assessed by determining the stability of the bispecific antibody. The biological activity of the bispecific antibody also can be assessed by determining its binding affinity to antigen-containing peptides and/or by assessing its binding affinity to peptides with which it may cross-react. The term “affinity” refers to the equilibrium constant for the reversible binding of two agents and is expressed as the dissociation constant (K_{D}). Affinity of a binding agent to a ligand, such as affinity of an antibody for an epitope, can be, for example, from about 1 femtomolar (fM) to about 1 millimolar (mM) (e.g., from about 1 picomolar (pM) to about 1 nanomolar (nM), or from about 1 nM to about 1 micromolar (μM)). In some embodiments, the affinity of an anti-CFHR4 antibody may be from about 1 nm to about 20 nm, and desirably from about 5 nm to about 10 nm. Antibody affinity for an antigen or epitope of interest can be measured using any art-recognized assay. Such methods include, for example, fluorescence activated cell sorting (FACS), separable beads (e.g., magnetic beads), antigen panning, and/or ELISA (see, e.g., Janeway et al. (eds.), Immunobiology, 5th ed., Garland Publishing, New York, N.Y., 2001).

[0144] In some embodiments, a bispecific antibody, or composition comprising a bispecific antibody, may be administered alone or in combination with other drugs. For example, the bispecific antibodies of the present disclosure (e.g., an anti-CFHR4/anti-C3 bispecific antibody, an anti-CFHR4/anti-VEGF bispecific antibody, and an anti-C3/anti-VEGF bispecific antibody) can be administered in combination with other agents for the treatment or prevention of AMD and/or GA, as disclosed herein. For example, bispecific antibodies of the present disclosure, or antibody conjugates, fusion proteins, or polymeric formulations thereof, can be used either alone or in combination with other agents in a therapy. For instance, a bispecific antibody may be co-administered with at least one additional therapeutic agent. In certain embodiments, an additional therapeutic agent is another antibody, a chemotherapeutic agent, a cytotoxic agent, an anti-angiogenic agent, an immunosuppressive agent, a prodrug, a cytokine, a cytokine antagonist, cytotoxic radiotherapy, a corticosteroid, an anti-emetic, a cancer vaccine, an analgesic, a growth-inhibitory agent, or combinations thereof.

[0145] For example, in certain embodiments, any of the preceding methods further comprises administering one or more additional compounds. In certain embodiments, the bispecific antibody, antibody conjugate, fusion protein, or polymeric formulation is administered simultaneously with the additional compound(s). In certain embodiments, the bispecific antibody, antibody conjugate, fusion protein, or polymeric formulation is administered before or after the additional compound(s). In certain embodiments, the additional compound binds to a second biological molecule selected from the group consisting of VEGF, IL-1B; IL-6; IL-6R; IL-13; IL-13R; PDGF; angiopoietin; Ang2; Tie2; SIP; integrins αvβ3, αvβ5, and α5β1; betacellulin; apelin/APJ; erythropoietin; complement factor D; TNFα; HtrA1; a VEGF receptor; ST-2 receptor; and proteins genetically linked to AMD risk, such as complement pathway components C2, factor B, factor H, CFHR3, C3b, C5, C5a, and C3a; HtrA1; ARMS2; TIMP3; HLA; interleukin-8 (IL-8); CX3CR1; TLR3; TLR4; CETP; LIPC; COL10A1; and TNERSF10A. In some embodiments, the additional compound is an antibody or antigen-binding fragment thereof. In some embodiments according to (or as applied to) any of the embodiments above, the ocular disorder is an intraocular neovascular disease selected from the group consisting of proliferative retinopathies, choroidal neovascularization (CNV), age-related macular degeneration (AMD), geographic atrophy (GA), diabetic and other ischemia-related retinopathies, diabetic macular edema, pathological myopia, von Hippel-Lindau disease, histoplasmosis of the eye, retinal vein occlusion (RVO), including CRVO and BRVO, corneal neovascularization, retinal neovascularization, and retinopathy of prematurity (ROP).

[0146] In some instances, a bispecific antibody of the present disclosure, or an antibody conjugate, fusion protein, and/or polymeric formulation thereof, may be administered in combination with at least one additional therapeutic agent for treatment of an ocular disorder, for example, an ocular disorder described herein (e.g., AMD (e.g., wet AMD or dry AMD), GA, DME, DR, or RVO). Exemplary additional therapeutic agents for combination therapy for treatment of ocular disorders include, without limitation, anti-angiogenic agents, such as VEGF antagonists, including, for example, anti-VEGF antibodies (e.g., the anti-VEGF Fab LUCENTIS® (ranibizumab)), soluble receptor fusion proteins (e.g., the recombinant soluble receptor fusion protein EYLEA® (aflibercept, also known as VEGF Trap Eye; Regeneron/Aventis)), aptamers (e.g., the anti-VEGF pegylated aptamer MACUGEN® (pegaptanib sodium; NeXstar Pharmaceuticals/OSI Pharmaceuticals)), and VEGFR tyrosine kinase inhibitors (e.g., 4-(4-bromo-2-fluoroanilino)-6-methoxy-7-(1-methylpiperidin-4-ylmethoxy) quinazoline (ZD6474), 4-(4-fluoro-2-methylindol-5-yloxy)-6-methoxy-7˜ (3-pyrrolidin-1-ylpropoxy) quinazoline (AZD2171), vatalanib (PTK787), semaxaminib (SU5416; SUGEN), and SUTENT® (sunitinib)); Tryptophanyl-tRNA synthetase (TrpRS); squalamine; RETAANE® (anecortave acetate for depot suspension; Alcon, Inc.); Combretastatin A4 Prodrug (CA4P); MIFEPREX® (mifepristone-ru486); subtenon triamcinolone acetonide; intravitreal crystalline triamcinolone acetonide; matrix metalloproteinase inhibitors (e.g., Prinomastat (AG3340; Pfizer)); fluocinolone acetonide (including fluocinolone intraocular implant; Bausch & Lomb/Control Delivery Systems); linomide; inhibitors of integrin B3 function; angiostatin, and combinations thereof.

[0147] Further examples of additional therapeutic agents that can be used in combination with a bispecific antibody of the present disclosure, or an antibody conjugate, fusion protein, and/or polymeric formulation thereof, for treatment of an ocular disorder (e.g., AMD, GA, DME, DR, or RVO), include, but are not limited to, VISUDYNE® (verteporfin; a light-activated drug that is typically used in conjunction with photodynamic therapy with a non-thermal laser), PKC412, Endovion (NS 3728; NeuroSearch A/S), neurotrophic factors (e.g., glial derived neurotrophic factor (GDNF) and ciliary neurotrophic factor (CNTF)), diltiazem, dorzolamide, PHOTOTROP®, 9-cis-retinal, eye medication (e.g., phospholine iodide, echothiophate, or carbonic anhydrase inhibitors), veovastat (AE-941; AEterna Laboratories, Inc.), Sirna-027 (AGF-745; Sirna Therapeutics, Inc.), neurotrophins (including, by way of example only, NT-4/5, Genentech), Cand5 (Acuity Pharmaceuticals), INS-37217 (Inspire Pharmaceuticals), integrin antagonists (including those from Jerini AG and Abbott Laboratories), EG-3306 (Ark Therapeutics Ltd.), BDM-E (BioDiem Ltd.), thalidomide (as used, for example, by EntreMed, Inc.), cardiotrophin-1 (Genentech), 2-methoxyestradiol (Allergan/Oculex), DL-8234 (Toray Industries), NTC-200 (Neurotech), tetrathiomolybdate (University of Michigan), LYN-002 (Lynkeus Biotech), microalgal compound (Aquasearch/Albany, Mera Pharmaceuticals), D-9120 (Celitech Group plc), ATX-S10 (Hamamatsu Photonics), TGF-beta 2 (Genzyme/Celtrix), tyrosine kinase inhibitors (e.g., those from Allergan, SUGEN, or Pfizer), NX-278-L (NeXstar Pharmaceuticals/Gilead Sciences), Opt-24 (OPTIS France SA), retinal cell ganglion neuroprotectants (Cogent Neurosciences), N-nitropyrazole derivatives (Texas A&M University System), KP-102 (Krenitsky Pharmaceuticals), cyclosporin A, therapeutic agents used in photodynamic therapy (e.g., VISUDYNE®; receptor-targeted PDT, Bristol-Myers Squibb, Co.; porfimer sodium for injection with PDT; verteporfin, QLT Inc.; rostaporfin with PDT, Miravent Medical Technologies; talaporfin sodium with PDT, Nippon Petroleum; and motexafin lutetium, Pharmacyclics, Inc.), antisense oligonucleotides (including, by way of example, products tested by Novagali Pharma SA and ISIS-13650, Isis Pharmaceuticals), and combinations thereof.

[0148] A bispecific antibody of the present disclosure, or an antibody conjugate, fusion protein, and/or polymeric formulation thereof, may be administered in combination with a therapy or surgical procedure for treatment of an ocular disorder (e.g., AMD, GA DME, DR, or RVO), including, for example, laser photocoagulation (e.g., panretinal photocoagulation (PRP)), drusen lasering, macular hole surgery, macular translocation surgery, implantable miniature telescopes, PHI-motion angiography (also known as micro-laser therapy and feeder vessel treatment), proton beam therapy, microstimulation therapy, retinal detachment and vitreous surgery, scleral buckle, submacular surgery, transpupillary thermotherapy, photosystem I therapy, use of RNA interference (RNAi), extracorporeal rheopheresis (also known as membrane differential filtration and rheotherapy), microchip implantation, stem cell therapy, gene replacement therapy, ribozyme gene therapy (including gene therapy for hypoxia response element, Oxford Biomedica; Lentipak, Genetix; and PDEF gene therapy, Gen Vec), photoreceptor/retinal cells transplantation (including transplantable retinal epithelial cells, Diacrin, Inc.; retinal cell transplant, Cell Genesys, Inc.), acupuncture, and combinations thereof.

[0149] In some embodiments, a bispecific antibody of the present disclosure, or an antibody conjugate, fusion protein, and/or polymeric formulation thereof, can be administered in combination with an anti-angiogenic agent for treatment of an ocular disorder (e.g., AMD, GA, DME, DR, or RVO). Any suitable anti-angiogenic agent can be used in combination with an antibody of the present disclosure, including, but not limited to, those listed by Carmeliet et al. Nature 407:249-257, 2000. In some embodiments, the anti-angiogenic agent is a VEGF antagonist, including, but not limited to, an anti-VEGF antibody (e.g., the anti-VEGF Fab LUCENTIS® (ranibizumab), RTH-258 (formerly ESBA-1008, an anti-VEGF single-chain antibody fragment; Novartis), or a bispecific anti-VEGF antibody (e.g., an anti-VEGF/anti-angiopoeitin 2 bispecific antibody such as RG-7716; Roche)), a soluble recombinant receptor fusion protein (e.g., EYLEA® (aflibercept)), a VEGF variant, a soluble VEGFR fragment, an aptamer capable of blocking VEGF (e.g., pegaptanib) or VEGFR, a neutralizing anti-VEGFR antibody, a small molecule inhibitor of VEGFR tyrosine kinases, an anti-VEGF DARPin® (e.g., abicipar pegol), a small interfering RNAs which inhibits expression of VEGF or VEGFR, a VEGER tyrosine kinase inhibitor (e.g., 4˜ (4-bromo-2-fluoroanilino)-6-methoxy-7-(1-methylpiperidin-4-ylmethoxy) quinazoline (ZD6474), 4-(4-fluoro-2-methylindol-5-yloxy)-6-methoxy-7-(3-pyrrolidin-1-ylpropoxy) quinazoline (AZD2171), vatalanib (PTK787), semaxaminib (SUS416; SUGEN), and SUTENT® (sunitinib)), and combinations thereof.

[0150] Other suitable anti-angiogenic agents that may be administered in combination with a bispecific antibody of the present disclosure, or an antibody conjugate, fusion protein, and/or polymeric formulation thereof, for treatment of an ocular disorder (e.g., AMD, GA, DME, DR, or RVO) include corticosteroids, angiostatic steroids, anecortave acetate, angiostatin, endostatin, tyrosine kinase inhibitors, matrix metalloproteinase (MMP) inhibitors, insulin-like growth factor-binding protein 3 (IGFBP3), stromal derived factor (SDF-1) antagonists (e.g., anti-SDF-1 antibodies), pigment epithelium-derived factor (PEDF), gamma-secretase, Delta-like ligand 4, integrin antagonists, hypoxia-inducible factor (HIF)-1α antagonists, protein kinase CK2 antagonists, agents that inhibit stem cell (e.g., endothelial progenitor cell) homing to the site of neovascularization (e.g., an anti-vascular endothelial cadherin (CD-144) antibody and/or an anti-SDF-1 antibody), and combinations thereof.

[0151] In some embodiments, a bispecific antibody of the present disclosure, or an antibody conjugate, fusion protein, and/or polymeric formulation thereof, can be administered in combination with an agent that has activity against neovascularization for treatment of an ocular disorder (e.g., AMD, GA, DME, DR, or RVO), such as an anti-inflammatory drug, a mammalian target of rapamycin (mTOR) inhibitor (e.g., rapamycin, AFINITOR® (everolimus), and TORISEL® (temsirolimus)), cyclosporine, a tumor necrosis factor (TNF) antagonist (e.g., an anti-TNFα antibody or antigen-binding fragment thereof (e.g., infliximab, adalimumab, certolizumab pegol, and golimumab) or a soluble receptor fusion protein (e.g., etanercept)), an anti-complement agent, a nonsteroidal anti-inflammatory agent (NSAID), or combinations thereof.

[0152] Any suitable AMD therapeutic agent can be administered as an additional therapeutic agent in combination with a bispecific antibody of the present disclosure, or an antibody conjugate, fusion protein, and/or polymeric formulation thereof, for treatment of an ocular disorder (e.g., AMD, GA, DME, DR, or RVO), including, but not limited to, a VEGF antagonist, for example, an anti-VEGF antibody (e.g., LUCENTIS® (ranibizumab), RTH-258 (formerly ESBA-1008, an anti-VEGF single-chain antibody fragment; Novartis), or a bispecific anti-VEGF antibody (e.g., an anti-VEGF/anti-angiopoeitin 2 bispecific antibody such as RG-7716; Roche)), a soluble VEGF receptor fusion protein (e.g., EYLEA® (aflibercept)), an anti-VEGF DARPin® (e.g., abicipar pegol; Molecular Partners AG/Allergan), or an anti-VEGF aptamer (e.g., MACUGEN®) (pegaptanib sodium)); a platelet-derived growth factor (PDGF) antagonist, for example, an anti-PDGF antibody, an anti-PDGFR antibody (e.g., REGN2176-3), an anti-PDGF-BB pegylated aptamer (e.g., FOVISTA®; Ophthotech/Novartis), a soluble PDGFR receptor fusion protein, or a dual PDGF/VEGF antagonist (e.g., a small molecule inhibitor (e.g., DE-120 (Santen) or X-82 (TyrogeneX)) or a bispecific anti-PDGF/anti-VEGF antibody)); VISUDYNE® (verteporfin) in combination with photodynamic therapy; an antioxidant; a complement system antagonist, for example, a complement factor C5 antagonist (e.g., a small molecule inhibitor (e.g., ARC-1905; Opthotech) or an anti-C5 antibody (e.g., LFG-316; Novartis), a properdin antagonist (e.g., an anti-properdin antibody, e.g., CLG-561; Alcon), or a complement factor D antagonist (e.g., an anti-complement factor D antibody, e.g., lampalizumab; Roche)); a visual cycle modifier (e.g., emixustat hydrochloride); squalamine (e.g., OHR-102; Ohr Pharmaceutical); vitamin and mineral supplements (e.g., those described in the Age-Related Eye Disease Study 1 (AREDS1; zinc and/or antioxidants) and Study 2 (AREDS2; zinc, antioxidants, lutein, zeaxanthin, and/or omega-3 fatty acids)); a cell-based therapy, for example, NT-501 (Renexus); PH-05206388 (Pfizer), huCNS-SC cell transplantation (StemCells), CNTO-2476 (Janssen), OpRegen (Cell Cure Neurosciences), or MA09-hRPE cell transplantation (Ocata Therapeutics); a tissue factor antagonist (e.g., hl-con1; Iconic Therapeutics); an alpha-adrenergic receptor agonist (e.g., brimonidine tartrate); a peptide vaccine (e.g., S-646240; Shionogi); an amyloid beta antagonist (e.g., an anti-beta amyloid monoclonal antibody, e.g., GSK-933776); an SIP antagonist (e.g., an anti-SIP antibody, e.g., iSONEP™; Lpath Inc); a ROBO4 antagonist (e.g., an anti-ROBO4 antibody, e.g., DS-7080a; Daiichi Sankyo); a lentiviral vector expressing endostatin and angiostatin (e.g., RetinoStat); and any combination thereof. In some instances, AMD therapeutic agents (including any of the preceding AMD therapeutic agents) can be co-formulated. For example, the anti-PDGFR antibody REGN2176-3 can be co-formulated with aflibercept (EYLEA®). In some instances, such a co-formulation can be administered in combination with an antibody of the present disclosure. In some instances, the ocular disorder is AMD (e.g., wet AMD).

[0153] In addition to therapeutic uses, a bispecific antibody or antigen-binding fragment, described herein can be used in diagnostic or research applications. Research applications include, for example, methods that utilize the bispecific antibody and a label to detect the corresponding antigen(s) in a sample, e.g., in a human body fluid or in a cell or tissue extract. The bispecific antibody or antigen-binding fragment thereof may be employed in any suitable assay for measuring a corresponding antigen(s) in a sample for diagnostic and/or research purposes. Such assays include, but are not limited to, sandwich immunoassays, enzyme immunoassays (EIA), enzyme-linked immunosorbent assays (ELISA), lateral flow assays, competitive inhibition immunoassays (e.g., forward and reverse), competitive binding assays, Forster resonance energy transfer (FRET), one-step antibody detection assays, single molecule detection assays, radioimmunoassays (RIA), and FACS. Such methods are disclosed in, for example, U.S. Pat. Nos. 6,143,576; 6,113,855; 6,019,944; 5,985,579; 5,947,124; 5,939,272; 5,922,615; 5,885,527; 5,851,776; 5,824,799; 5,679,526; 5,525,524; and 5,480,792; and Adamczyk et al., Anal. Chim. Acta, 579 (1): 61-67 (2006).

[0154] The bispecific antibody or antigen-binding fragment thereof can be provided in a kit, e.g., a packaged combination of reagents in predetermined amounts with instructions for performing an assay using the antibody (e.g., an assay that detects a corresponding antigen(s)). As such, the disclosure provides a kit comprising the antibody or antigen-binding fragment described herein and instructions for use thereof. The instructions can be in paper form or computer-readable form, such as a disk, CD, DVD, etc. Alternatively or additionally, the kit can comprise a calibrator or control, and/or at least one container (e.g., tube, microtiter plates, or strips) for conducting an assay, and/or a buffer, such as an assay buffer or a wash buffer. Ideally, the kit comprises all components, i.e., reagents, standards, buffers, diluents, etc., which are necessary to perform the assay. Other additives may be included in the kit, such as stabilizers, buffers (e.g., a blocking buffer or lysis buffer), and the like. The relative amounts of the various reagents can be varied to provide for concentrations in solution of the reagents which substantially optimize the sensitivity of the assay. The reagents may be provided as dry powders (typically lyophilized), including excipients which on dissolution will provide a reagent solution having the appropriate concentration.

[0155] The following examples further illustrate the various embodiments of the present disclosure but should not be construed as in any way limiting its scope.

### EXAMPLES

[0156] It will be readily apparent to those skilled in the art that other suitable modifications and adaptations of the methods of the present disclosure described herein are readily applicable and appreciable, and may be made using suitable equivalents without departing from the scope of the present disclosure or the aspects and embodiments disclosed herein. Having now described the present disclosure in detail, the same will be more clearly understood by reference to the following examples, which are merely intended only to illustrate some aspects and embodiments of the disclosure, and should not be viewed as limiting to the scope of the disclosure. The disclosures of all journal references, U.S. patents, and publications referred to herein are hereby incorporated by reference in their entireties.

[0157] The present disclosure has multiple aspects, illustrated by the following non-limiting examples.

### Example 1

[0158] Genetic Analysis of CFHR4 in Geographic Atrophy. This example describes analysis that was performed to determine the effects of CFHR1/4 deletions on Age-Related Macular Degeneration (AMD) in FinnGen. There are three common haplotypes composed of a variant in CFH (rs1061170 Y402H) and a variant that is an eQTL and pQTL for CFH and CFHR4 (rs10922109) that are associated with three different levels of risk. The high AMD risk haplotype (H402+high CFHR4 expression, rs106117_C (ref)/rs10922109_C (ref)) was set as the “reference” haplotype to allow comparison to other haplotypes (frequency in cases: 0.56, frequency in controls: 0.36). The haplotype carrying Y402 (the alternate allele at rs106117) and with High CFHR4/low CFH expression (reference allele at rs10922109) is associated with “medium” AMD risk (frequency in cases: 0.196, frequency in controls: 0.21). The “low” risk haplotype carries Y402 (the alternate allele at rs106117) and has low CFHR4/high CFH expression (alternate allele at rs10922109), with a frequency in cases: 0.22, frequency in controls: 0.43). It was hypothesized that haplotypes that carry a CFHR1/4 deletion will have a different risk for AMD on the medium risk background.

[0159] Genetic variation at this locus provides a natural experiment to determine the effect of CFHR1/4 deletion on AMD. The CFHR1/4 deletion is not directly genotyped in FinnGen but there are variants (rs528922402 and rs188297593) that imperfectly tag (r2=0.36, D′=1 in Finland) non-overlapping subsets of the deletion in Finnish populations in 1000Genomes dataset (HapMap phase3). The variant rs188297593 has a D′<1.0 in HapMap Phase 3 samples of European ancestry (1 of 4 carriers are not tagging CFHR1/4 deletion). These two variants capture a subset but not all carriers of the deletion.

[0160] To determine the effect of the CFH variant (rs1061170), CFHR4/CFH eQTL/pQTL (rs10922109) and CFHR1/4 deletion (tagged by rs528922402 and rs188297593), AMD risk was examined for individuals from FinnGen R6. Haplotypes composed of the individual variants were generated and a logistic regression was run in R to predict the effect of the haplotype on AMD risk adjusting for sex, age, and PC's. The reference haplotype was used as reference such that all other haplotype effects are in relation to that one.

[0161] Consistent with the hypothesis that CFHR4 contributes directly to AMD risk, “medium” risk haplotypes with CFHR4 deleted conferred increased protection from AMD relative to “medium” risk haplotypes with intact CFHR4.

TABLE 1
Results from haplotype analysis in FinnGen showing AMD risk from each
haplotype with Odds Ratio and p-values from logistic regression.

| | | rs528922402 | rs188297593 | | | | | | |
|---|---|---|---|---|---|---|---|---|---|
| | | (GAA/G) | (T/A) | | | | | | |
| rs1061170 | rs10922109 | CFHR1/4 | CFHR1/4 | | | | | | |
| (C/T) | (C/A) | deletion | deletion | | | | | | |
| CFH risk | CFHR4 / | tagging | tagging | AMD | | Frequency | Frequency | Odds | P- |
| variant | CFH pQTL | variant | variant | cases | Controls | in Cases | in Controls | Ratio | value |
| H402 (C) | High | — | — | 5,447 | 218,864 | 0.5622 | 0.4336 | 1 (Ref) | — |
| | CFHR4/ low | | | | | | | | |
| | CFH (C) | | | | | | | | |
| Y402 (T) | High | — | — | 1,452 | 75,112 | 0.1499 | 0.1488 | 0.75 | 6e−19 |
| | CFHR4/ low | | | | | | | [0.71, | |
| | CFH (C) | | | | | | | 0.80] | |
| Y402 (T) | High | — | CFHR1/4 | 100 | 6,188 | 0.0103 | 0.0123 | 0.65 | 6e−05 |
| | CFHR4/ low | | deletion | | | | | [0.53, | |
| | CFH (C) | | | | | | | 0.80] | |
| Y402 (T) | High | CFHR1/4 | — | 43 | 4,011 | 0.0044 | 0.0079 | 0.42 | 5e−08 |
| | CFHR4/ low | deletion | | | | | | [0.31, | |
| | CFH (C) | | | | | | | 0.57] | |
| Y402 (T) | Low | — | — | 2,635 | 200,601 | 0.2720 | 0.3974 | 0.50 | 2e−163 |
| | CFHR4/ high | | | | | | | [0.48, | |
| | CFH (A) | | | | | | | 0.53] | |

### Example 2

[0162] Generation of recombinant CFHR4 proteins. Recombinant protein preparations were undertaken to produce specific proteins which could be used as immunogens/antigens, screening reagents, and/or control reagents. All efforts were made in service of the goal of generating a panel of anti-CFHR4b antibodies with the desired properties.

[0163] Proteins with the sequence corresponding to human CFHR4b, human CFHL-1 wild type, human CFHL-1 with Tyrosine 402 mutated to Histidine, and cynomolgus CFHR4b were successfully produced with various protein tags. When finished, all protein preparations exceeded 90% purity by analytical methods and were less than <1 endotoxin unit per milliliter. Examples of final specifications for individual preparations are below.

[0164] Beginning with in silico analysis, appropriate wild type amino acid sequences of human and cynomolgus CFHR4b and human CFHL-1 were located and extracted from publicly available databases. The sequences were then further analyzed and modified manually using Geneious Prime software in accordance with the project plan. Sequences were examined for liabilities and modified to add further amino acid sequence which encoded for “tags” to facilitate purification, lower immunogenicity, or simplify analytical screening. Examples of protein tags used in this work include the HIS tag, a proprietary mouse IgG Fc tag, and the Avi tag. Tags were separated from each other and from the CFHR4b or CFHL-1 sequence with short linker sequences. All tags were added to the C-terminal end of the sequences. Additionally, the native signal peptide was removed and replaced with a signal peptide conducive to recombinant expression.

[0165] After all modifications were complete, the amino acid sequences were back translated into DNA sequences and optimized for the codon biases found in the human genome. These optimized DNA sequences were sent to Integrated DNA Technologies and produced as DNA fragment(s) with DNA overhangs added to the 5′ and 3′ ends. Utilizing the DNA overhangs and the Gibson cloning method, these DNA fragments were assembled into the expected sequence and cloned into a mammalian expression plasmid driven by a CMV promoter. The plasmid was propagated in E. coli with appropriate antibiotic selection and prepared, at a scale useful for recombinant expression, utilizing commercially available preparation kits purchased from Qiagen. The sequence of the plasmid and the expression gene was then confirmed using Sanger sequencing.

[0166] Using polyethylenimine, the sequence verified plasmid was transfected into human embryonic kidney cells adapted for recombinant expression. One day after transfection, the cells were supplemented with chemicals and nutrients designed to increase recombinant protein expression. These supplements include sodium propionate, valproic acid, glucose, glutamine, and a variety of yeast lysates. Five days after transfection, the expressing cell cultures were harvested. As the recombinant protein is secreted into the growth medium, the cells, cell fragments, and cell debris, were removed via centrifugation and filtration through a membrane with pores no greater than 0.22 microns. The clarified culture medium, conditioned with the recombinant protein, was now ready for purification.

[0167] Using a FPLC (Fast pressure liquid chromatography) and the appropriate commercially available pre-packed affinity chromatography column for the C-terminal tag(s) the protein of interest was purified from the cell culture medium and immobilized on the chromatography column. For HIS tagged proteins, a Ni-NTA agarose column was used. For Fc tagged proteins, a proA agarose column was employed. Multiple column washes followed, each specific for the type of column/tag/chromatography. The protein of interest was eluted from the column with 300 mM of imidazole for HIS tagged proteins, and with 100 mM Citrate pH 3.5 for Fc tagged proteins. Following elution, the Fc tagged proteins were adjusted to a neutral pH using IM Hepes pH 9. Neutralization was unnecessary for HIS tagged proteins, as the elution buffer is at a neutral pH.

[0168] Protein quality and quantity were assessed using a combination of SDS-PAGE gel electrophoresis, spectrophotometry, and analytical-SEC (size exclusion chromatography). Most proteins for this project required further purification. To further polish the proteins, the FPLC and a second chromatography column were employed. Separation by size, accomplished with a size exclusion column, enabled increased protein purities up to >90%. SEC also enabled buffer exchange out of the affinity chromatography elution buffer and into the final buffer of choice (PBS). The protein sample then moved onto quality control. If, at any point during purification, protein concentration needed to be increased, Amicon Ultra molecular weight cutoff (MWCO) filtration units were used to concentrate protein by separating protein from buffer. MWCO was chosen to ensure compatibility with the size of the protein of interest. Before moving to final quality control, all final samples were concentrated to >1 milligram per milliliter.

[0169] Endotoxin contamination in the final protein sample was assayed using Charles River's Endosafe PTS system. Spectrophotometry determined the final protein concentration. Three micrograms of the final sample were injected onto an analytical SEC column (YMC Diol 300) to determine its final purity. Additionally, sometimes SDS-PAGE electrophoresis was performed to determine final quality. Once all final metrics passed, the protein was sterilized in a biosafety cabinet using a sterile 0.22 micron filter. This was followed by sterile aliquoting and flash freezing in liquid nitrogen before storage at −80° C.

### Example 3

[0170] Recovery of CFHR4 antibody sequences from immunized mice. CFHR4 Immunization: Three cohorts of Alloy Therapeutic transgenic humanized mice (ATX-GK) were immunized with human CFHR4b using the following 5-week protocols (FIGS. 3A-3C):

[0171] Cohort 1:5 ATX-GK mice immunized with human CFHR4B (ATX-P-57) using standard 5-week RIMMS protocol of 10 ug subcutaneous dosing of antigen emulsified in complete Freund's adjuvant followed by 5 weekly subcutaneous dosing of antigen emulsified in incomplete Freund's adjuvant. Cohort 2:5 ATX-GK mice immunized with human CFHR4B (ATX-P-57) using 5-week RIMMS protocol of weekly 10 ug subcutaneous dosing of antigen emulsified in incomplete Freund's adjuvant. Cohort 3:5 ATX-GK mice immunized with human CFHR4B (ATX-P-57) using 5-week RIBI IP protocol of weekly 10 ug Intraperitoneal dosing of antigen emulsified in RIBI adjuvant.

[0172] Sample bleeds were taken at week four and tested for antigen positive serum titer and purification tag negative serum titer by ELISA. ELISA plates were coated with either 1 ug/ml of CFHR4 immunogen or an irrelevant protein (P114) with the same purification tag as the immunogen. Antigen coated plates were incubated with seven 10-fold serial dilutions of sera starting at 1:300. Antibodies bound to antigen were detected by anti-mouse IgG HRP secondary antibody and one step TMB solution. The absorbance signal at 450 nm was measured with an ELISA microplate reader.

[0173] Hybridoma: Immune tissues from high titer mice were harvested and preserved for antibody discovery. Hybridoma cell lines producing CFHR4 antibodies were produced by fusion of single B Cells from spleen and lymph nodes of titer positive mice with myeloma cells. Twenty 96 well plates of hybridoma fusions were generated and expanded. Hybridomas expressing CFHR4 specific antibodies were detected by antigen binding by ELISA. Affinity of antibodies in the hybridoma supernatants were measured by SPR using the Octet instrument. CFHR4 antibodies in hybridoma supernatant were loaded on a biosensor. Response was measured as a nm shift in the interference pattern and was proportional to the number of antibodies bound to the surface of the biosensor. The binding interaction of CFHR4 to the immobilized antibodies was measured as association (kon). Following analyte association, the biosensor was dipped into PBS without CFHR4, and the bound antigen was allowed to dissociate from the antibody (kdis). KD (M), or affinity of the antibodies for CFHR4 was measured as kdis/kon. Heavy and light chains from validated hybridomas were sequenced. RNA was isolated from CFHR4 antibody secreting hybridomas and heavy and light chain variable regions were cloned by reverse transcription using gene specific primers followed by PCR amplification with variable chain gene specific primers. PCR products were sequenced by standard Sanger sequencing methods.

[0174] Phage Display: Variable heavy and light chains were amplified from the spleen of high titer immunized mice by reverse transcription using gene specific primers followed by PCR amplification with variable chain gene specific primers. Variable regions were cloned into a phage display vector designed to express Fabs on phage g3p protein. Libraries of phage expressing unique Fabs were amplified and purified. Phage were allowed to bind to biotinylated CFHR4 antigens captured on streptavidin magnetic beads. Phage remaining bound to antigen beads after several stringent washes was eluted using a basic triethylamine solution and neutralized with Tris buffer pH 8.0. Eluted phages were reinfected into TG1 bacterial cells, amplified by co-infection with M13 helper phage, and purified by PEG precipitation. Purified phages expressing Fabs were selected for antigen binding as described. Phage from the second round were diluted and infected into TG1 cells. Polyclonal pools of phage output from two rounds of panning were tested by ELISA to confirm that the pools contained CFHR4-specific phage. Variable heavy and light chain regions were sequenced from single infected bacterial colonies using a rolling circle amplification and standard Sanger sequencing.

[0175] Antibody Sequencing: Unique variable heavy and light chain pairs from hybridoma and phage display campaigns were cloned into vectors designed to express full length antibodies as IgGs in HEK293 cells under the control of a CMV promoter. Antibody expression vectors were complexed with polyethylenimine and transfected into HEK293 cultures. After 5 days of shaking at 37° C. in 293 cell culture media, antibodies were captured on agarose-based protein A resin. After several stringent washes, antibodies were cluted in glycine solution, pH 3, neutralized with hepes, pH 9, and buffer exchanged into PBS.

### Example 4

[0176] Human CFHR4 monoclonal antibody differential scanning fluorimetry (DSF). Development of effective monoclonal antibodies depends not only on their biological activity but also on their physicochemical properties, such as homogeneity and stability. mAb stability can be affected by their formulation. Among the many techniques used to study the stability of mAbs, differential scanning fluorimetry (DSF) offers both excellent throughput and minimal material consumption. DSF measures the temperature of the protein unfolding transition (Tm) based on the change in fluorescence intensity of an environmentally sensitive dye.

[0177] Experiments were conducted to assess the thermal stability of the human CFHR4 monoclonal antibodies (“ATX” antibodies) of the present disclosure by determining the melting temperature. Thermal stability was assessed via differential scanning fluorimetry (DSF) utilizing the Protein Thermal Shift (PTS) assay from Applied Biosystems. The assay was performed according to the manufacturer's instruction. Briefly, the antibody to be evaluated was prepared in triplicate by mixing with Protein Thermal Shift dye and buffer; a real-time melt experiment from 25° C. to 95° C. was run on QuantStudio 3. Data was analyzed by using Protein Thermal Shift Software and the melting temperature (Tm) was calculated from the melt curve (FIG. 4).

TABLE 2
DSF analysis of human anti-CFHR4 monoclonal antibodies.
Protein Thermal Shift Assay Results

| Sample ID | Tm D - Mean | Tm 2 - Mean |
|---|---|---|
| ATX-P-101 | 70.86 | |
| ATX-P-560 | 61.92 | |
| ATX-P-561 | 61.78 | 70.40 |
| ATX-P-562 | 62.34 | 72.79 |
| ATX-P-563 | 61.85 | |
| ATX-P-564 | 61.71 | |
| ATX-P-565 | 61.92 | 72.16 |
| ATX-P-566 | 61.36 | 75.03 |
| ATX-P-568 | 60.59 | |
| ATX-P-569 | 61.78 | |
| ATX-P-570 | 62.06 | 84.01 |
| ATX-P-572 | 61.78 | 82.26 |
| ATX-P-573 | 62.62 | |
| ATX-P-574 | 61.78 | |
| ATX-P-576 | 62.83 | |
| ATX-P-577 | 61.85 | |
| ATX-P-578 | 61.29 | |
| ATX-P-579 | 62.40 | |
| ATX-P-580 | 61.77 | |
| ATX-P-582 | 61.84 | 76.00 |
| ATX-P-583 | 61.56 | 72.22 |
| ATX-P-587 | 62.19 | 80.49 |
| ATX-P-588 | 61.42 | |
| ATX-P-591 | 61.56 | |
| ATX-P-592 | 61.21 | 82.10 |
| ATX-P-594 | 62.04 | |
| ATX-P-595 | 61.90 | |
| ATX-P-596 | 61.90 | 74.80 |
| ATX-P-597 | 63.51 | |
| ATX-P-598 | 60.99 | 68.63 |
| ATX-P-600 | 60.77 | 79.14 |
| ATX-P-602 | 61.34 | 85.66 |
| ATX-P-603 | 61.27 | |
| ATX-P-604 | 61.54 | |
| ATX-P-607 | 62.03 | |
| ATX-P-608 | 61.12 | |
| ATX-P-609 | 61.54 | 82.28 |

### Example 5

[0178] CFHR4 Antibody Cross-Blocking. High-throughput epitope binning experiments were conducted on real-time label-free biosensors (Carterra LSA) to sort large panels of mAbs into bins based on their ability to block one another for binding to the antigen. In a pairwise epitope binning analysis, antigen and antibody 2 (analyte antibody) are sequentially applied to the sensor chip (HC200M) covalently pre-loaded with antibody 1 (ligand antibody). An increase in response upon exposure to the analyte antibody indicates non-competition between the two antibodies, whereas a lack of change in the signal indicates competition. Antibodies having the same blocking profiles towards others in the test set are grouped into one bin. Community network plots are used to explore clustering of mAbs that share similar but not necessarily identical competition profiles. Rather than relying strictly on the sandwiching/blocking assignments in the heat map (FIG. 5A), as the Bin network plots do, hierarchical clustering is applied to the sorted heat map to generate network plots (FIG. 5B), which progressively group mAbs.

### Example 6

[0179] CFHR4 Antibody Binding Kinetics. Kinetic experiments were performed on Carterra LSA with a running buffer of PBS pH 7.40, 1% BSA, 0.05% Tween20. Antibodies were covalently printed on a HC30M chip. The chip was activated with 33 mM s-NHS and 133 mM EDC in 100 mM MES pH 5.5 for 7 minutes. Antibodies at 10 mg/ml in acetic acid buffer pH 4.5 were used for printing for 10 min. The printed chip was then quenched with 1 M ethanolamine pH 8.5 for 7 min. For kinetics analysis, purified recombinant his tagged protein ATX-P-57, human CDFR4B-His, at a concentration from 0.076 nM to 1500 nM (a serial 3-fold dilution) was injected sequentially. For each concentration, there was 5 min association followed by 15 min dissociation. Results were processed and analyzed in Carterra LSA Kinetics Software. The kinetic data was referenced with the interstitial reference spots and double-referenced to a buffer cycle, and then fit globally to a 1:1 binding model to determine their apparent association and dissociation kinetic rate constants (ka and kd values). The ratio kd/ka was used to derive the KD value of each antigen/mAb interaction, i.e., KD=kd/ka (FIG. 6).

### Example 7

[0180] CFHR4 Antibody Cross Reactivity. Experiments were conducted to determine the reactivity of the CFHR4 antibodies of the present disclosure (developed using CFHR4b antigen; see Example 3) with various other CFHR4 proteins. As shown in FIG. 7, experiments were conducted to determine the reactivity of the CFHR4 antibodies with the Cynomolgus monkey CFHR4b protein (cCFHR4b). The binding experiments were performed on Carterra LSA with a running buffer of PBS pH 7.40, 1% BSA, 0.05% Tween20. Antibodies were covalently printed on a HC30M chip. Chip was activated with 33 mM s-NHS and 133 mM EDC in 100 mM MES pH 5.5 for 7 Min. Antibodies at 10 mg/ml in acetic acid buffer pH 4.5 were used for printing for 10 min. The printed chip was then quenched with 1 M ethanolamine pH 8.5 for 7 min. For the reactivity assay, ATX-P-141, cyno CFHR4B-mFc, at 160 nM was tested with 5 min association followed by 15 min dissociation. Results were processed and analyzed in Carterra LSA Kinetics Software. The data was referenced with the interstitial reference spots and double-referenced to a buffer cycle, and then the responses (nm) after association were reported. Isotype control was used to determine the cutoff response for positive binding.

[0181] Experiments were also conducted to determine the reactivity of the CFHR4 antibodies with the human CFHR4a protein (FIG. 8). The binding experiments were performed on Carterra LSA with a running buffer of PBS pH 7.40, 1% BSA, 0.05% Tween20. Antibodies were covalently printed on a HC30M chip. Chip was activated with 33 mM s-NHS and 133 mM EDC in 100 mM MES pH 5.5 for 7 minutes. Antibodies at 10 mg/ml in acetic acid buffer pH 4.5 were used for printing for 10 min. The printed chip was then quenched with 1 M ethanolamine pH 8.5 for 7 min. For the reactivity assay, ATX-P-56, human CFHL4A-His, at 540 nM was tested with 5 min association followed by 15 min dissociation. Results were processed and analyzed in Carterra LSA Kinetics Software. The data was referenced with the interstitial reference spots and double-referenced to a buffer cycle, and then the responses (nm) after association were reported. Isotype control was used to determine the cutoff response for positive binding.

[0182] Experiments were also conducted to determine the reactivity of the CFHR4 antibodies with the human CFHR3 protein (FIG. 9). The binding experiments were performed on Carterra LSA with a running buffer of PBS pH 7.40, 1% BSA, 0.05% Tween20. Antibodies were covalently printed on a HC30M chip. Chip was activated with 33 mM s-NHS and 133 mM EDC in 100 mM MES pH 5.5 for 7 minutes. Antibodies at 10 mg/ml in acetic acid buffer pH 4.5 were used for printing for 10 min. The printed chip was then quenched with 1 M ethanolamine pH 8.5 for 7 min. For the reactivity assay, ATX-P-58, human CFHL3-His, at 550 nM was tested with 5 min association followed by 15 min dissociation. Results were processed and analyzed in Carterra LSA Kinetics Software. The data was referenced with the interstitial reference spots and double-referenced to a buffer cycle, and then the responses (nm) after association were reported. Isotype control was used to determine the cutoff response for positive binding.

[0183] Experiments were also conducted to determine the reactivity of the CFHR4 antibodies with the human CFHL-1 (Y402H) protein (FIG. 10). The binding experiments were performed on Carterra LSA with a running buffer of PBS pH 7.40, 1% BSA, 0.05% Tween20. Antibodies were covalently printed on a HC30M chip. Chip was activated with 33 mM s-NHS and 133 mM EDC in 100 mM MES pH 5.5 for 7 minutes. Antibodies at 10 mg/ml in acetic acid buffer pH 4.5 were used for printing for 10 min. The printed chip was then quenched with 1 M ethanolamine pH 8.5 for 7 min. For the reactivity assay, ATX-P-421, human CFHL1-Y402H-His, at 380 nM was tested with 5 min association followed by 15 min dissociation. Results were processed and analyzed in Carterra LSA Kinetics Software. The data was referenced with the interstitial reference spots and double-referenced to a buffer cycle, and then the responses (nm) after association were reported. Isotype control was used to determine the cutoff response for positive binding.

### Example 8

[0184] C3 Convertase Assembly assay. A screening assay was developed to evaluate the ability of the CFHR4 antibodies of the present disclosure to affect C3 convertase formation (FIG. 11A). C3bBb is the C3 convertase (EC 3.4.21.43) of the alternative pathway of complement activation. The C3 enzyme is responsible for amplification of pathway activation and for deposition on target cells of C3b and the membrane attack complex. It is controlled by the serum proteins Factor H, Factor I (EC 3.4.21.45), and properdin. The formation of C3 convertase requires C3b, Factor B, Factor D (EC 3.4.21.46), and Mg2+. After formation of the reversible, bimolecular complex C3bB (Mg), Factor D cleaves Factor B, releasing the activation fragment Ba, and generates the active enzyme C3bBb. The C3 enzyme is a serine protease whose catalytic site resides in the Bb subunit. Additionally, CFHR4 has been reported to directly promote C3 convertase formation by binding to C3b, with stronger ability to assemble C3bBb on CFHR4, and with C3bBb-CFHR4 complex being more resistant to CFH cleavage in comparison with C3bBb.

[0185] Thus, the assay is designed to test the ability of a CHFR4 antibody to disrupt the formation of the C3 convertase complex by measuring the amount of Factor B that is present using an anti-FB monoclonal antibody conjugated to a reporter moiety. As illustrated in FIG. 11A, in the presence of CFHR4 (absence of an effective CFHR4 antibody), the C3 convertase complex is formed and the anti-FB antibody binds FB and a signal is detected (i.e., complement activation). However, in the presence of an effective anti-CFHR4 antibody, the C3 convertase complex is disrupted and the antibody-bound FB is washed away, resulting in a decreased signal (i.e., no complement activation).

[0186] An example of the assay protocol is provided below:

[0187] Preparation of FHR-4 coated plates—(1) Coat plates with 5 μg/ml FHR-4 in PBS, incubate in plastic bag with moist paper O/N in RT. (2) Wash 3×300 μl with Wieslab wash buffer. (3) Block wells with 150 μl 3% BSA in PBS. (4) Incubate for a minimum of 1 h RT. (5) Aspirate wells and wash with Superblock 1×300 μl. (6) Dry plates at 37° C., 16% RH, for at least 1 h. (7) Store in plate bags in fridge.

[0188] Assay protocol—(1) Bring diluent, plate, substrate, and stop solution to RT. (2) Dilute anti-OVA antibody to desired concentrations in AP diluent. (3) Add 50 μl Anti-OVA, AP diluent (blank), and diluent control to the plate. (4) Incubate with lid for 1 h at RT. (5) Wash with Wieslab wash buffer 3×300 μl. (6) Add 50 μl C3b at 5 μg/ml or AP diluent to the plate. (7) Incubate the plate at 37° C. for 30 min. (8) Wash with Wieslab wash buffer 3×300 μl. (9) Add 50 μl protein mix (FB, FD, Properdin) to the plate. (10) Incubate the plate at 37° C. for 30 min. (11) Wash with Wieslab wash buffer 3×300 μl. (12) 50 μl anti-factor B antibody diluted 1:2000 in AP diluent were added to the whole plate. (13) Incubate the plate at RT for 1 h. (14) Wash with Wieslab wash buffer 3×300 μl. (15) Add 50 μl Rabbit anti-goat IgG-HRP antibody diluted 1:5000 in Stabilzyme to the whole plate. (16) Incubate the plate at RT for 1 h. (17) Wash with Wieslab wash buffer 3×300 μl. (18) 50 μl substrate were added to the whole plate. (19) Incubate the plate at RT for 20 min. (20) 50 μl stop solution were added to the whole plate. (21) The plate was read at 450-620 nm.

[0189] As shown in FIG. 11B, dose response curves were generated for the top 8 inhibitory antibodies screened in the C3 Convertase Assembly assay. The percent C3 Convertase activity is plotted relative to negative control (diluent only). FIG. 11C includes the IC50 values calculated for each antibody tested in FIG. 11B. And FIG. 11D provides a representative summary of data demonstrating at least three functional classes of anti-CFHR4 antibodies.

### Example 9

[0190] Recovery of C3 antibody sequences from immunized mice. C3 antibody sequences were recovered from immunized mice followed by phage display with either fixed or diverse light chains. Selected leads were produced as full aglyco IgG1s and extensively characterized.

[0191] C3 Recombinant Proteins. C3 proteins were procured from Complement Technologies (Tyler, TX); the proteins were purified directly from the relevant species (human or cynomolgus) sera. Recombinant proteins were qualified with analytic SEC and binding studies to established antibodies.

[0192] C3 Immunization. Two cohorts of Alloy Therapeutics transgenic humanized mice, ATX-GK Mix, were immunized with either human C3 or cynomolgus C3 using the following 5 week protocols: Cohort 1: 5 ATX-GX mix mice immunized with human C3 (REA23) using standard 5-week RIMMS protocol with 10 ug subcutaneous dosing of antigen. The first dose was emulsified in complete Freund's adjuvant with 4 follow on weekly 10 ug doses in incomplete Freund's adjuvant. Cohort 2: As Cohort 1 but with cynomolgus C3 (REA20).

[0193] Sample bleeds were conducted at the fourth week and tested for antigen positive titer and cross reactive titer (human for cynomolgus cohort or cynomolgus for human cohort). ELISA plates were coated with 1 μg/ml of relevant recombinant protein overnight. Coated plates were incubated with sera across a descending 5×10-fold range starting at 1:100 and terminating at 1: 10E7 dilutions. Antibodies bound to the coated antigen were detected with anti-mouse IgG HRP secondary antibody and quantified with the aid of one step TMB solution and OD determination at 450 nM using a microplate reader. Note, the positive control antibody used for the ELISA experiment is not cross reactive to the cyno C3 protein (FIGS. 12A-12D).

[0194] Antibody Sequence Recovery—Phage Display. Spleen tissues from high titer mice were preserved at harvest for sequence recovery via phage display. RNA was extracted from said tissues. Two sequence recovery strategies were used in this study, a fixed light strategy and a diverse light chain strategy. For both strategies, variable heavy chains were amplified from the RNA prepared from the spleen tissues via reverse transcription. Following reverse transcription, viable gene specific primers and PCR were used to create DNA fragments which could be cloned into a phage display vector designed to express Fabs on phage g3p protein. For the diverse light chain strategy, the same approach was used to amplify the natural diversity of the light chain from the spleen RNA and clone into the Fab vector. For the fixed light chain strategy, the relevant part of the Fab vector was fixed to two specific sequences with constructs synthesized commercially that match the LC of ATX-P-569 and ATX-P-592.

[0195] Once complete, the libraries of phage expressing unique Fabs or Fabs with fixed light chains were amplified, purified, and depleted on non-specific binders. Phage were allowed to bind to biotinylated C3 antigens (human and/or cyno) captured on streptavidin magnetic beads. Phage remaining bound to antigens beads after several stringent washes was eluted using a basic triethylamine solution and neutralized with Tris buffer pH 8.0. Eluted phages were reinfected into TG1 bacterial cells, amplified by co-infection with M12 helper phage, and purified by PEG precipitation. A small sample was saved for polyclonal analysis. Purified phages expressing Fabs were selected for antigen binding as described earlier in a subsequent 2nd round. Phage from the second round output were diluted and infected in TG1 cells. Polyclonal pools of phage output from both rounds were tested by ELISA to confirm enrichment and examine cross reactivity (FIG. 13).

[0196] Follow on monoclonal ELISA on individual colonies was conducted and from this second ELISA, clones were identified for rolling circle amplification and Sanger Sequencing of the variable heavy and light chain regions of the Fab where appropriate (for diverse libraries only, for fixed LC libraries only sequencing the HC was required). From the sequence analysis, a group of clones were advanced for reformatting into full length antibodies. The selected group broadly represented the clonotype diversity discovered in both the fixed/cLC and diverse libraries. In total, 113 paired variable heavy and light chain sequences were put into production across the fixed and diverse libraries.

[0197] Antibody Production. Unique variable heavy and light chain pairs from the phage display campaigns were cloned into vectors designed to express full length antibodies as algyco IgG1s in HEK293 cells under the control of a CMV promoter. Antibody expression vectors were complexed with polyethylenimine and transfected into HEK293 cultures. After 5 days of shaking at 37 C in 293 cell culture media, antibodies were captured on agarose-based protein A resin. After several stringent washes, antibodies were eluted in citrate solution, pH 3, neutralized with Hepes, pH 9, and buffer exchanged into PBS.

### Example 10

[0198] C3 Antibody Binding Kinetics. Experiments were conducted to determine the binding kinetics of anti-C3 antibodies, species cross-reactivity, and epitope cross-blocking.

[0199] Kinetic experiments were performed on Carterra LSA with a running buffer of PBS pH 7.40, 1% BSA, 0.05% Tween20. Antibodies were captured on an anti-human Fc capture chip prepared with an HC30M chip. For kinetics analysis, C3a, C3b from Complement Technology, or C3-His from Acro Biosystems, were injected sequentially at a concentration from 0.076 nM to 1500 nM (a serial 3-fold dilution). For each concentration, there was a 5 Min association followed by 15 Min dissociation. Results were processed and analyzed in Carterra LSA Kinetics Software. The kinetic data was referenced with the interstitial reference spots and double-referenced to a buffer cycle, and then fit globally to a 1:1 binding model to determine their apparent association and dissociation kinetic rate constants (Kₐ and K_{D} values). The ratio K_{D}/Kₐ was used to derive the K_{D} value of each antigen/mAb interaction (K_{D}=K_{D}/Kₐ) (FIG. 14).

[0200] Cross-reactivity assay by SPRi. The binding experiments were performed on Carterra LSA with a running buffer of PBS pH 7.40, 1% BSA, 0.05% Tween20. Antibodies were covalently printed on an HC30M chip. Chip was activated with 33 mM s-NHS and 133 mM EDC in 100 mM MES pH 5.5 for 7 minutes. Antibodies at 10 mg/ml in acetic acid buffer pH 4.5 were used for printing for 10 min. The printed chip was then quenched with 1 M ethanolamine pH 8.5 for 7 min. For the reactivity assay, human C3, C3a, C3b, and cyno C3 from Complement Technology was tested with 5 Min association followed by 15 Min dissociation. Results were processed and analyzed in Carterra LSA Kinetics Software. The data was referenced with the interstitial reference spots and double-referenced to a buffer cycle, and then the responses (nm) after association were reported. Isotype control was used to determine the cutoff response for positive binding (FIGS. 15 and 16).

[0201] Epitope Binning. High-throughput epitope binning experiment was done on real-time label-free biosensors (Carterra LSA) to sort large panels of mAbs into bins based on their ability to block one another for binding to the antigen. In a pairwise epitope binning analysis, antigen and antibody 2 (analyte antibody) are sequentially applied to the sensor chip (HC200M) covalently pre-loaded with antibody 1 (ligand antibody). An increase in response upon exposure to the analyte antibody indicates non-competition between the two antibodies, whereas a lack of change in the signal indicates competition. Antibodies having the same blocking profiles towards others in the test set are grouped into one bin. Community network plots are used to explore clustering of mAbs that share similar but not necessarily identical competition profiles. Rather than relying strictly on the sandwiching/blocking assignments in the heat map, as the Bin network plots do, hierarchical clustering is applied to the sorted heat map to generate dendrograms, which progressively group mAbs (FIGS. 17-18).

### Example 11

[0202] C3 Antibody Polyreactivity. Experiments were conducted to determine the reactivity of the C3 antibodies of the present disclosure with various other proteins using ELISA and Carterra LSA platforms (FIGS. 19 and 20). The methods used were similar to those reported by Hötzel et al. (2012). Briefly, baculovirus particles (BVP, Lake Pharma) was diluted 1:100 in 50 mM sodium bicarbonate (pH 9.3). After overnight incubation of 50 μL of BVP on ELISA plates (3369; Corning) at 4° C. overnight, unbound BVPs were aspirated from the wells. All remaining steps were performed at RT. The plate was blocked with 100 μL of blocking buffer (PBS with 1% BSA) for 1 h before three washes with 100 μL of PBS. Next, 50 μL of 16 nM testing antibodies was added to the wells and incubated for 1 h followed by washes with 100 μL of PBS. HRP-conjugated goat anti-human IgG antibody at 1:1000 (Jackson ImmunoResearch) was used as the secondary antibody, and incubated for 1 h followed by washes as before. Finally, 50 μL of TMB substrate (34021; Fisher Scientific) was added to each well and incubated for 10-15 min. The reactions were stopped by adding 50 μL of 2 M sulfuric acid to each well. The absorbance was read at 450 nm and BVP score determined by normalizing absorbance by control wells with no test antibody.

[0203] Additional experiments were conducted to determine the blocking potential of the C3 antibodies of the present disclosure for CFHR4 (FIG. 21B) and CFH (FIG. 21B).

### Sequences

[0204] The various amino acid sequences and nucleic acid sequences referenced herein are provided below.

TABLE 3
Anti-CFHR4 antibodies (CDR sequences)

| | | | |
|---|---|---|---|
| SEQ ID | Antibody | | |
| NO: | Name: | Descriptor: | Sequence: |

VH Family: IGHV1

| | | | |
|---|---|---|---|
| 1 | — | HCDR1 | X₁YX₂X₃X₄ |
| | | Consensus | (X₁ is S, T, G, or N; X₂ is G or Y; X₃ is I or M; X₄ is S, H, or Q) |
| 2 | ATX-P-591 | HCDR1 | SYGIS |
| 3 | ATX-P-583 | HCDR1 | TYGIS |
| 4 | ATX-P-602 | HCDR1 | GYYMH |
| 5 | ATX-P-601 | HCDR1 | SYYMH |
| 6 | ATX-P-607 | HCDR1 | SYYMH |
| 7 | ATX-P-597 | HCDR1 | NYYMQ |
| 8 | — | HCDR2 | X₁IX₂X₃X₄X₅GX₆TX₇X₈X₉X₁₀X₁₁X₁₂QX₁₃ |
| | | Consensus | (X₁ is W or I; X₂ is S, N, or D; X₃ is A or P; X₄ is Y, N, or S; X₅ is |
| | | | N, G, or S; X₆ is N, S, or G; X7 is N, H, T, or S; X₈ is Y or N; X₉ |
| | | | is A or Y; X₁₀ is Q or A; X₁₁ is K or S; X₁₂ is L or F; X₁₃ is G or |
| | | | D) |
| 9 | ATX-P-591 | HCDR2 | WISAYNGNTNYAQKLQG |
| 10 | ATX-P-583 | HCDR2 | WISAYSGNTHYAQSLQD |
| 11 | ATX-P-602 | HCDR2 | WINPNSGGTNYAKKFQG |
| 12 | ATX-P-601 | HCDR2 | IINPSGGSTNYAQKFQG |
| 13 | ATX-P-607 | HCDR2 | IINPSGGSTSYAQKFQG |
| 14 | ATX-P-597 | HCDR2 | IIDPSGGSTTYAQKFQG |
| 15 | ATX-P-591 | HCDR3 | DLRGTAFDY |
| 16 | ATX-P-583 | HCDR3 | DEGYCSSTGCLNLFDP |
| 17 | ATX-P-602 | HCDR3 | GDTIFRLVTPLDY |
| 18 | ATX-P-601 | HCDR3 | DQSGGMDV |
| 19 | ATX-P-607 | HCDR3 | DPEYSSAFDI |
| 20 | ATX-P-597 | HCDR3 | DEGTDRPGWGY |

VH Family: IGHV3

| | | | |
|---|---|---|---|
| 21 | — | HCDR1 | X₁YX₂X₃X₄ |
| | | Consensus | (X₁ is S, T, R, or D; X₂ is T, V, A, G, S, or E; X₃ is M or I; X₄ is |
| | | | N, S, or H) |
| 22 | ATX-P-564 | HCDR1 | SYTMN |
| 23 | ATX-P-568 | HCDR1 | SYVMS |
| 24 | ATX-P-574 | HCDR1 | SYAMS |
| 25 | ATX-P-565 | HCDR1 | TYGIH |
| 26 | ATX-P-578 | HCDR1 | RYSMN |
| 27 | ATX-P-588 | HCDR1 | DYAMH |
| 28 | ATX-P-600 | HCDR1 | DYAMH |
| 29 | ATX-P-569 | HCDR1 | DYAMH |
| 30 | ATX-P-596 | HCDR1 | DYAMH |
| 31 | ATX-P-576 | HCDR1 | DYEMH |
| 32 | — | HCDR2 | X₁IX₂X₃X₄X₅X₆X₇X₈X₉X₁₀X₁₁DX₁₂VX₁₃G |
| | | Consensus | (X₁ is S, V, Y, G or D; X₂ is S or W; X₃ is S, V, G, H, or W; X₄ is |
| | | | S, D, N or T; X₅ is S or G; X₆ is S or G; X₇ is Y, S, T or R; X₈ is |
| | | | T, K, I or V; X₉ is Y, F, N, or G; X₁₀ is Y or H; X₁₁ is A or V; X₁₂ |
| | | | is S or P; X₁₃ is R, K, or T) |
| 33 | ATX-P-564 | HCDR2 | SISSSSSYTYYADSVRG |
| 34 | ATX-P-568 | HCDR2 | VISVSGGSTFYADSVRG |
| 35 | ATX-P-574 | HCDR2 | VISGSGGTTYYADSVKG |
| 36 | ATX-P-565 | HCDR2 | VIWHDGSSKNYVDSVTG |
| 37 | ATX-P-578 | HCDR2 | YISSSSSTIFHADSVKG |
| 38 | ATX-P-588 | HCDR2 | GISWNSGSIGYADSVKG |
| 39 | ATX-P-600 | HCDR2 | GISWSGGSIGYADSVKG |
| 40 | ATX-P-569 | HCDR2 | GISWNSGSIGYADSVKG |
| 41 | ATX-P-596 | HCDR2 | GISWTGGSVGYADPVKG |
| 42 | ATX-P-576 | HCDR2 | DISRNSGRIGYADSVKG |
| 43 | ATX-P-564 | HCDR3 | SASIAAGMDV |
| 44 | ATX-P-568 | HCDR3 | DGLAVAGEDH |
| 45 | ATX-P-574 | HCDR3 | RGDYGDYMDV |
| 46 | ATX-P-565 | HCDR3 | RGNWNYGFYYYYMDV |
| 47 | ATX-P-578 | HCDR3 | GNWNYYYMDV |
| 48 | ATX-P-588 | HCDR3 | DRDDGYNYAGVFDY |
| 49 | ATX-P-600 | HCDR3 | DREDGYNYGGVEDY |
| 50 | ATX-P-569 | HCDR3 | DIGNGYTKGDVEDI |
| 51 | ATX-P-596 | HCDR3 | DMGDGYSRNWPFDY |
| 52 | ATX-P-576 | HCDR3 | DIWGSGYFDY |

VH Family: IGHV4

| | | | |
|---|---|---|---|
| 53 | — | HCDR1 | X₁X₂X₃WX₄X₅ |
| | | Consensus | (X₁ is T, S. G, or I; X₂ is S, R, Y, or H; X₃ is D, N, H, K or Y; X₄ |
| | | | is W or S; X₅ is T or S) |
| 54 | ATX-P-580 | HCDR1 | TSDWWT |
| 55 | ATX-P-579 | HCDR1 | TSNWWT |
| 56 | ATX-P-577 | HCDR1 | SSNWWT |
| 57 | ATX-P-608 | HCDR1 | SSNWWS |
| 58 | ATX-P-609 | HCDR1 | SSNWWS |
| 59 | ATX-P-603 | HCDR1 | GSHWWS |
| 60 | ATX-P-582 | HCDR1 | ISKWWS |
| 61 | ATX-P-598 | HCDR1 | SSNWWS |
| 62 | ATX-P-571 | HCDR1 | SRNWWS |
| 63 | ATX-P-570 | HCDR1 | GYYWS |
| 64 | ATX-P-563 | HCDR1 | SHYWS |
| 65 | — | HCDR2 | X₁X₂X₃X₄X₅GX₆X₇X₈X₉X₁₀PLSX₁₁S |
| | | Consensus | (X₁ is E or Y; X₂ is I, T, or V; X₃ is Y, H, or F; X₄ is H or Y; X₅ is |
| | | | S, D, T, G; X₆ is S, T, G, or N; X₇ is T or I; X₈ is N or K; X₉ is Y, |
| | | | K, or S; X₁₀ is N, S, K, or H; X₁₁ is K or Q) |
| 66 | ATX-P-580 | HCDR2 | EIYHSGSTNYNPSLKS |
| 67 | ATX-P-579 | HCDR2 | EIYHDGSTNYSPSLQS |
| 68 | ATX-P-577 | HCDR2 | ETYHDGSTNYNPSLKS |
| 69 | ATX-P-608 | HCDR2 | EIYHTGSTNKKPSLKS |
| 70 | ATX-P-609 | HCDR2 | EIYHSGSTNYNPSLKS |
| 71 | ATX-P-603 | HCDR2 | EIYHTGSTNKNPSLKS |
| 72 | ATX-P-582 | HCDR2 | EIYHTGSTNYHPSLKS |
| 73 | ATX-P-598 | HCDR2 | EIYHSGTTNYNPSLKS |
| 74 | ATX-P-571 | HCDR2 | EIYHGGTTNYNPSLKS |
| 75 | ATX-P-570 | HCDR2 | YVHYSGGTKSNPSLKS |
| 76 | ATX-P-563 | HCDR2 | YIFYSGNINYNPSLKS |
| 77 | ATX-P-580 | HCDR3 | WYFDL |
| 78 | ATX-P-579 | HCDR3 | FYIDV |
| 79 | ATX-P-577 | HCDR3 | FYFDY |
| 80 | ATX-P-608 | HCDR3 | DREGGTTEAFDI |
| 81 | ATX-P-609 | HCDR3 | DQLSSGPTDAFDI |
| 82 | ATX-P-603 | HCDR3 | DQYTGSPRDAFDI |
| 83 | ATX-P-582 | HCDR3 | DELRLGELSPSLDI |
| 84 | ATX-P-598 | HCDR3 | DRLRLGESSSDVFDI |
| 85 | ATX-P-571 | HCDR3 | GGLRLGELSPNAFDI |
| 86 | ATX-P-570 | HCDR3 | ERYEWNSYFDY |
| 87 | ATX-P-563 | HCDR3 | DRGGSYSYHFDC |

VH Family: IGHV6

| | | | |
|---|---|---|---|
| 88 | — | HCDR1 | SNX₁AX₂WN |
| | | Consensus | (X₁ is S, T, or N; X₂ is A or S) |
| 89 | ATX-P-566 | HCDR1 | SNSAAWN |
| 90 | ATX-P-594 | HCDR1 | SASASWN |
| 91 | ATX-P-604 | HCDR1 | SNSAAWN |
| 92 | ATX-P-595 | HCDR1 | SNSAAWN |
| 93 | ATX-P-610 | HCDR1 | SNSAAWN |
| 94 | ATX-P-572 | HCDR1 | SNSAAWN |
| 95 | ATX-P-587 | HCDR1 | SNSAAWN |
| 96 | ATX-P-592 | HCDR1 | SNSAAWN |
| 97 | ATX-P-560 | HCDR1 | SNTAAWN |
| 98 | ATX-P-581 | HCDR1 | SNNAAWN |
| 99 | ATX-P-573 | HCDR1 | SNSAAWN |
| 100 | ATX-P-561 | HCDR1 | SNSAAWN |
| 101 | ATX-P-562 | HCDR1 | SNSAAWN |
| 102 | — | HCDR2 | X₁TX₂YRSX₃X₄X₅X₆X₇X₈X₉X₁₀SX₁₁X₁₂S |
| | | Consensus | (X₁ is R, T, M, or K; X₂ is Y or F; X₃ is K or R; X₄ is W or L; X₅ |
| | | | is F, Y, or S; X₆ is N, S, D, or A; X₇ is N, V, G, D, Y, or A; X₈ is |
| | | | Y or F; X₉ is S, A, or P; X₁₀ is V, L, or A; X₁₁ is Vor M; X₁₂ is K |
| | | | or S) |
| 103 | ATX-P-566 | HCDR2 | RTYYRSKWFNNYSVSVKS |
| 104 | ATX-P-594 | HCDR2 | TTYYRSKWFNVYAVSVKS |
| 105 | ATX-P-604 | HCDR2 | RTYYRSKWFNGYAVSVKS |
| 106 | ATX-P-595 | HCDR2 | RTYYRSKWENDYALSVKS |
| 107 | ATX-P-610 | HCDR2 | RTYYRSKWYNDYALSVKS |
| 108 | ATX-P-572 | HCDR2 | MTYYRSKWYSVFAVSVKS |
| 109 | ATX-P-587 | HCDR2 | KTYYRSKWYNYYALSVKS |
| 110 | ATX-P-592 | HCDR2 | RTYYRSKWYSDYPLSVKS |
| 111 | ATX-P-560 | HCDR2 | RTYYRSKWYNDYAVSVKS |
| 112 | ATX-P-581 | HCDR2 | RTYYRSKWYNAYAVSVKS |
| 113 | ATX-P-573 | HCDR2 | RTYYRSKLYSDYAVSVKS |
| 114 | ATX-P-561 | HCDR2 | RTYYRSKWYNGYAVSMKS |
| 115 | ATX-P-562 | HCDR2 | RTFYRSRWSAAYAASVSS |
| 116 | ATX-P-566 | HCDR3 | DLGELLDWYFDL |
| 117 | ATX-P-594 | HCDR3 | DRGDLLHWYFDL |
| 118 | ATX-P-604 | HCDR3 | DRGELLHWYFDL |
| 119 | ATX-P-595 | HCDR3 | EPGIVAPGPEDY |
| 120 | ATX-P-610 | HCDR3 | EPGIAAPGPFDY |
| 121 | ATX-P-572 | HCDR3 | EGGIVGATPFDY |
| 122 | ATX-P-587 | HCDR3 | DGDYYLPSPFDL |
| 123 | ATX-P-592 | HCDR3 | DSGIVETTPFDY |
| 124 | ATX-P-560 | HCDR3 | DNWNNGGPGFDP |
| 125 | ATX-P-581 | HCDR3 | EGGYIYGLDQ |
| 126 | ATX-P-573 | HCDR3 | EGGYTYGYDY |
| 127 | ATX-P-561 | HCDR3 | EGVGATTGFDY |
| 128 | ATX-P-562 | HCDR3 | EGVGSSTGFDY |

VL Family: IGKV1

| | | | |
|---|---|---|---|
| 129 | - | LCDR1 | RX₁SX₂X₃X₄X₅X₆X₇LX₈ |
| | | Consensus | (X₁ is A or T; X₂ is Q or K; X₃ is G, S, D, or N; X₄ is I, F, or V; X₅ |
| | | | is T, R, A, S, N, G, or I; X₆ is T, N, G, S, I, K, or Y; X₇ is W, D, or |
| | | | Y; X₈ is A, T, G, N, or D) |
| 130 | ATX-P-574 | LCDR1 | RASQGITTWLA |
| 131 | ATX-P-576 | LCDR1 | RTSQGIRNWLA |
| 132 | ATX-P-563 | LCDR1 | RASQSFAGWLA |
| 133 | ATX-P-610 | LCDR1 | RASQGISSWLA |
| 134 | ATX-P-560 | LCDR1 | RASQGISSWLA |
| 135 | ATX-P-581 | LCDR1 | RASQGVNNWLA |
| 136 | ATX-P-573 | LCDR1 | RASQGISSWLA |
| 137 | ATX-P-561 | LCDR1 | RASQGISSWLT |
| 138 | ATX-P-562 | LCDR1 | RASKGISIWLA |
| 139 | ATX-P-580 | LCDR1 | RASQGIRNDLG |
| 140 | ATX-P-579 | LCDR1 | RASQGIRKDLG |
| 141 | ATX-P-577 | LCDR1 | RASQDIRNDLG |
| 142 | ATX-P-591 | LCDR1 | RASQSINTYLN |
| 143 | ATX-P-583 | LCDR1 | RASQNIGSYLN |
| 144 | ATX-P-601 | LCDR1 | RASQSINYLN |
| 145 | ATX-P-607 | LCDR1 | RASQSIRSYLN |
| 146 | ATX-P-597 | LCDR1 | RASQSISSYLD |
| 147 | ATX-P-582 | LCDR1 | RASQNINNYLN |
| 148 | ATX-P-571 | LCDR1 | RASQSISSYLN |
| 149 | ATX-P-568 | LCDR1 | RASQSISTWLA |
| 150 | ATX-P-578 | LCDR1 | RASQSVNSWLA |
| 151 | ATX-P-569 | LCDR1 | RASQNIITWLA |
| 152 | — | LCDR2 | X₁X₂SX₃LX₄X₅ |
| | | Consensus | (X₁ is G, A, T, or K; X₂ is A or T; X₃ is S, T, G, or N; X₄ is E, Q, |
| | | | or L; X₅ is S, T, or G) |
| 153 | ATX-P-574 | LCDR2 | GASSLES |
| 154 | ATX-P-576 | LCDR2 | AASSLQT |
| 155 | ATX-P-563 | LCDR2 | AASTLQS |
| 156 | ATX-P-610 | LCDR2 | AASSLQS |
| 157 | ATX-P-560 | LCDR2 | AASSLQS |
| 158 | ATX-P-581 | LCDR2 | AASSLLS |
| 159 | ATX-P-573 | LCDR2 | AASSLQS |
| 160 | ATX-P-561 | LCDR2 | AASSLQG |
| 161 | ATX-P-562 | LCDR2 | AASSLQS |
| 162 | ATX-P-580 | LCDR2 | AASSLQS |
| 163 | ATX-P-579 | LCDR2 | TASTLQS |
| 164 | ATX-P-577 | LCDR2 | AASSLQS |
| 165 | ATX-P-591 | LCDR2 | AASSLQS |
| 166 | ATX-P-583 | LCDR2 | ATSTLQS |
| 167 | ATX-P-601 | LCDR2 | AASSLQS |
| 168 | ATX-P-607 | LCDR2 | AASSLQS |
| 169 | ATX-P-597 | LCDR2 | AASSLQS |
| 170 | ATX-P-582 | LCDR2 | AASSLQS |
| 171 | ATX-P-571 | LCDR2 | AASSLQS |
| 172 | ATX-P-568 | LCDR2 | KASGLES |
| 173 | ATX-P-578 | LCDR2 | KASNLEG |
| 174 | ATX-P-569 | LCDR2 | KASSLES |
| 175 | ATX-P-574 | LCDR3 | QQANSFPWT |
| 176 | ATX-P-576 | LCDR3 | QQANSFPYT |
| 177 | ATX-P-563 | LCDR3 | QQANSFPLT |
| 178 | ATX-P-610 | LCDR3 | QQNYRTPIT |
| 179 | ATX-P-560 | LCDR3 | QQANSFPPT |
| 180 | ATX-P-581 | LCDR3 | QQANSFPIT |
| 181 | ATX-P-573 | LCDR3 | QQANSFPPT |
| 182 | ATX-P-561 | LCDR3 | QQANSFPPT |
| 183 | ATX-P-562 | LCDR3 | QQANSFPPT |
| 184 | ATX-P-580 | LCDR3 | LHFNSYPFT |
| 185 | ATX-P-579 | LCDR3 | LQYNNYPFT |
| 186 | ATX-P-577 | LCDR3 | LQYNNYPFT |
| 187 | ATX-P-591 | LCDR3 | QHSFTTPFT |
| 188 | ATX-P-583 | LCDR3 | QQSFIIPFT |
| 189 | ATX-P-601 | LCDR3 | QQSYSTPIT |
| 190 | ATX-P-607 | LCDR3 | QQSYRTPVT |
| 191 | ATX-P-597 | LCDR3 | QQSYSTPLT |
| 192 | ATX-P-582 | LCDR3 | QQSYSTPLT |
| 193 | ATX-P-571 | LCDR3 | QETYSVPLT |
| 194 | ATX-P-568 | LCDR3 | QQYNSFSLI |
| 195 | ATX-P-578 | LCDR3 | QQYDTSWT |
| 196 | ATX-P-569 | LCDR3 | QQYSSYSYT |

VL Family: IGKV2

| | | | |
|---|---|---|---|
| 197 | — | LCDR1 | RSSQX₁LLHSX₂GYNX₃LD |
| | | Consensus | (X₁ is S or R; X₂ is T or S; X₃ is F or Y) |
| 198 | ATX-P-564 | LCDR1 | RSSQS LLHST GYNFLD |
| 199 | ATX-P-565 | LCDR1 | RSSQR LLHSS GYNYLD |
| 200 | — | LCDR2 | LX₁SX₂RAS |
| | | Consensus | (X₁ is A or G; X₂ is N or S) |
| 201 | ATX-P-564 | LCDR2 | LASNRAS |
| 202 | ATX-P-565 | LCDR2 | LGSSRAS |
| 203 | — | LCDR3 | MQX₁LQTPX₂T |
| | | Consensus | (X₁ is A or G; X₂ is Y or P) |
| 204 | ATX-P-564 | LCDR3 | MQALQTPYT |
| 205 | ATX-P-565 | LCDR3 | MQGLQTPPT |

VL Family: IGKV3

| | | | |
|---|---|---|---|
| 206 | — | LCDR1 | RASQX₁X₂X₃X₄X₅X₆X₇X₈A |
| | | Consensus | (X₁ is S, N, or T; X₂ is V or I; X₃ is S or R; X₄ is S, G or N; X₅ is |
| | | | Nor S; X₆ is L or Y; X₇ is A, L, or V) |
| 207 | ATX-P-608 | LCDR1 | RASQSVSSNLA |
| 208 | ATX-P-609 | LCDR1 | RASQSVSSNLA |
| 209 | ATX-P-602 | LCDR1 | RASQSVSSSYLA |
| 210 | ATX-P-588 | LCDR1 | RASQSVSSNLA |
| 211 | ATX-P-600 | LCDR1 | RASQNVRGSYLA |
| 212 | ATX-P-603 | LCDR1 | RASQSVSSSYLA |
| 213 | ATX-P-566 | LCDR1 | RASQSVRNSYVA |
| 214 | ATX-P-594 | LCDR1 | RASQSVSSSYLA |
| 215 | ATX-P-604 | LCDR1 | RASQTIRSSYLA |
| 216 | - | LCDR2 | GASX₁RAT |
| | | Consensus | (X₁ is T, S, or N) |
| 217 | ATX-P-608 | LCDR2 | GASTRAT |
| 218 | ATX-P-609 | LCDR2 | GASTRAT |
| 219 | ATX-P-602 | LCDR2 | GASSRAT |
| 220 | ATX-P-588 | LCDR2 | GASSRAT |
| 221 | ATX-P-600 | LCDR2 | GASNRAT |
| 222 | ATX-P-603 | LCDR2 | GASSRAT |
| 223 | ATX-P-566 | LCDR2 | GASSRAT |
| 224 | ATX-P-594 | LCDR2 | GASSRAT |
| 225 | ATX-P-604 | LCDR2 | GASSRAT |
| 226 | — | LCDR3 | QX₁YX₂X₃X₄X₅X₆T |
| | | Consensus | (X₁ is Q or H; X₂ is D or G; X₃ is N, S, or R; X₄ is W or S; X₅ is |
| | | | R, P, F, Y, V, or I; X₆ is T, W, L or I) |
| 227 | ATX-P-608 | LCDR3 | QQYD NWRT |
| 228 | ATX-P-609 | LCDR3 | QQYD NWRT |
| 229 | ATX-P-602 | LCDR3 | QQYG SSPWT |
| 230 | ATX-P-588 | LCDR3 | QQYG SSFT |
| 231 | ATX-P-600 | LCDR3 | QQYG SSYT |
| 232 | ATX-P-603 | LCDR3 | QHYG NSPLT |
| 233 | ATX-P-566 | LCDR3 | QQYG NSPLT |
| 234 | ATX-P-594 | LCDR3 | QQYG RSVT |
| 235 | ATX-P-604 | LCDR3 | QQYG RSII |

VL Family: IGKV4

| | | | |
|---|---|---|---|
| 236 | — | LCDR1 | KSSQSVLYSSNNKNYLA |
| | | Consensus | |
| 237 | ATX-P-596 | LCDR1 | KSSQSVLYSSNNKNYLA |
| 238 | ATX-P-598 | LCDR1 | KSSQSVLYSSNNKNYLA |
| 239 | ATX-P-570 | LCDR1 | KSSQSVLYSSNNKNYLA |
| 240 | ATX-P-595 | LCDR1 | KSSQSVLYSSNNKNYLA |
| 241 | ATX-P-572 | LCDR1 | KSSQSVLYSSNNKNYLA |
| 242 | ATX-P-587 | LCDR1 | KSSQSVLYSSNNKNYLA |
| 243 | ATX-P-592 | LCDR1 | KSSQSVLYSSNNKNYLA |
| 244 | — | LCDR2 | WASX₁RES |
| | | Consensus | (X₁ is T, P or N) |
| 245 | ATX-P-596 | LCDR2 | WASTRES |
| 246 | ATX-P-598 | LCDR2 | WASTRES |
| 247 | ATX-P-570 | LCDR2 | WASTRES |
| 248 | ATX-P-595 | LCDR2 | WASTRES |
| 249 | ATX-P-572 | LCDR2 | WASPRES |
| 250 | ATX-P-587 | LCDR2 | WASTRES |
| 251 | ATX-P-592 | LCDR2 | WASNRES |
| 252 | — | LCDR3 | QQX₁X₂X₃X₄PX₅X₆T |
| | | Consensus | (X₁ is Y or F; X₂ is G or Y; X₃ is S or N; X₄ is S, T, or I; X₅ is M, |
| | | | Y, or R; X₆ is Y or T) |
| 253 | ATX-P-596 | LCDR3 | QQYGSSPMYT |
| 254 | ATX-P-598 | LCDR3 | QQFYNTPYT |
| 255 | ATX-P-570 | LCDR3 | QQYYSSPRT |
| 256 | ATX-P-595 | LCDR3 | QQYYSTPYT |
| 257 | ATX-P-572 | LCDR3 | QQYYSIPRT |
| 258 | ATX-P-587 | LCDR3 | QQYYSTPYT |
| 259 | ATX-P-592 | LCDR3 | QQYYSTPYT |

TABLE 4
Anti-CFHR4 antibodies (VH and VL sequences)

| SEQ ID | Antibody | | |
|---|---|---|---|
| NO: | Name: | Descriptor: | Sequence: |
| 260 | ATX-P-583 | VH | QVQLVQSGAEVKKPGASVKVSCKASGYTFTTYGISWVRQAPGQ |
| | | | GLEWMGWISAYSGNTHYAQSLQDRVTMTTDTSTSTAYMEVRSL |
| | | | RSDDTAVYYCAKDEGYCSSTGCLNLFDPWGQGTLVTVSS |
| 261 | ATX-P-591 | VH | QVQLVQSGAEVKKPGASVKVSCKASGYTFTSYGISWVRQAPGQ |
| | | | GLEWMGWISAYNGNTNYAQKLQGRVTMTTDTSTSTAYMELRSL |
| | | | RSDDTAIYYCTRDLRGTAFDYWGQGTPVTVSS |
| 262 | ATX-P-602 | VH | QVQLVQSGAEVKKPGASVKVSCKASGYTFTGYYMHWVRQAPG |
| | | | QGLEWMGWINPNSGGTNYAKKFQGRVTMTRDTSISTAYMELSR |
| | | | LRSDDTAVYYCARGDTIFRLVTPLDYWGQGTLVTVSS |
| 263 | ATX-P-597 | VH | QVQLVQSGAEVKKPGASVKVSCKASGYTFTNYYMQWVRQAPG |
| | | | QGLEWLGIIDPSGGSTTYAQKFQGRVTMTRDTSTSTVHMELRSLR |
| | | | SEDTAVYYCARDEGTDRPGWGYWGQGTLVTVSS |
| 264 | ATX-P-601 | VH | QVQLVQSGAEVKKPGASVKVSCKASGYTFTSYYMHWVRQAPG |
| | | | QGLEWMGIINPSGGSTNYAQKFQGRLTMTRDTSTNTVYMELSSL |
| | | | RSEDTAVYYCATDQSGGMDVWGKGTTVTVSS |
| 265 | ATX-P-607 | VH | QVQLVQSGAEVKKPGASVKVSCKASGYTFTSYYMHWVRQAPG |
| | | | QGLEWMGIINPSGGSTSYAQKFQGRVTMTRDTSTNTVYMELSSL |
| | | | RSEDTAVYYCARDPEYSSAFDIWGQGTMVTVSS |
| 266 | ATX-P-583 | VH - nucleotide | CAGGTTCAGCTGGTGCAGTCTGGAGCTGAGGTGAAGAAGCCT |
| | | | GGGGCCTCAGTGAAGGTCTCCTGCAAGGCTTCTGGTTACACCT |
| | | | TTACCACCTATGGTATCAGCTGGGTGCGACAGGCCCCTGGACA |
| | | | AGGGCTTGAGTGGATGGGATGGATCAGCGCTTACAGTGGTAA |
| | | | CACACACTATGCACAGAGCCTCCAGGACAGAGTCACCATGAC |
| | | | CACAGACACATCCACGAGTACAGCCTACATGGAGGTGAGGAG |
| | | | CCTGAGATCTGACGACACGGCCGTGTATTACTGTGCGAAAGAT |
| | | | GAGGGATATTGTAGTAGTACCGGCTGCTTAAACTTGTTCGACC |
| | | | CCTGGGGCCAGGGAACCCTGGTCACCGTCTCCTCA |
| 267 | ATX-P-591 | VH - nucleotide | CAGGTTCAGCTGGTGCAGTCTGGAGCTGAGGTGAAGAAGCCT |
| | | | GGGGCCTCAGTGAAGGTCTCCTGCAAGGCTTCTGGTTACACCT |
| | | | TTACCAGCTATGGTATCAGCTGGGTGCGACAGGCCCCTGGACA |
| | | | AGGGCTTGAGTGGATGGGATGGATCAGCGCTTACAATGGTAA |
| | | | CACAAACTATGCACAGAAGCTCCAGGGCAGAGTCACCATGAC |
| | | | CACAGACACATCCACGAGCACAGCCTACATGGAGCTGAGGAG |
| | | | CCTGAGATCTGACGACACTGCCATTTATTACTGTACGAGAGAT |
| | | | CTACGTGGAACTGCCTTTGACTACTGGGGCCAGGGAACCCCGG |
| | | | TCACTGTCTCCTCA |
| 268 | ATX-P-602 | VH - nucleotide | CAGGTGCAGCTGGTGCAATCTGGGGCTGAGGTGAAGAAGCCT |
| | | | GGGGCCTCAGTGAAGGTCTCCTGCAAGGCTTCTGGATACACCT |
| | | | TCACCGGCTACTATATGCACTGGGTGCGACAGGCCCCTGGACA |
| | | | AGGACTTGAGTGGATGGGATGGATCAACCCTAACAGTGGTGG |
| | | | CACAAACTATGCAAAGAAGTTTCAGGGCAGGGTCACCATGAC |
| | | | CAGGGACACGTCCATCAGCACAGCCTACATGGAGTTGAGCAG |
| | | | GCTGAGATCTGACGACACGGCCGTGTATTACTGTGCGAGAGG |
| | | | GGATACGATTTTTCGACTGGTTACCCCTCTTGACTACTGGGGC |
| | | | CAGGGAACCCTGGTCACCGTCTCCTCA |
| 269 | ATX-P-597 | VH - nucleotide | CAGGTGCAGCTGGTGCAATCTGGAGCTGAGGTGAAGAAGCCT |
| | | | GGGGCCTCAGTGAAGGTTTCCTGCAAGGCATCTGGATACACCT |
| | | | TCACCAACTACTATATGCAGTGGGTGCGACAGGCCCCTGGACA |
| | | | AGGGCTTGAGTGGCTGGGAATAATCGACCCTAGTGGTGGTAG |
| | | | CACAACCTATGCACAGAAGTTCCAGGGCAGAGTCACCATGAC |
| | | | CAGGGACACGTCCACGAGCACAGTCCACATGGAGCTGAGAAG |
| | | | TCTGAGATCTGAGGACACGGCCGTCTATTATTGCGCGAGAGAT |
| | | | GAGGGAACAGATCGTCCCGGGTGGGGCTACTGGGGCCAGGGA |
| | | | ACCCTGGTCACTGTCTCCTCA |
| 270 | ATX-P-601 | VH - nucleotide | CAGGTGCAGCTGGTGCAATCTGGGGCTGAGGTGAAGAAGCCT |
| | | | GGGGCCTCAGTGAAGGTTTCCTGCAAGGCATCTGGATACACCT |
| | | | TCACCAGCTACTATATGCACTGGGTGCGACAGGCCCCTGGACA |
| | | | AGGGCTTGAGTGGATGGGAATAATCAACCCTAGTGGTGGTAG |
| | | | CACAAACTACGCACAGAAGTTCCAGGGCAGACTCACCATGAC |
| | | | CAGGGACACGTCCACGAACACAGTCTACATGGAACTGAGTAG |
| | | | CCTGAGATCTGAGGACACGGCCGTGTATTACTGTGCGACAGAT |
| | | | CAAAGTGGGGGGATGGACGTCTGGGGCAAAGGGACCACGGTC |
| | | | ACCGTCTCCTCA |
| 271 | ATX-P-607 | VH - nucleotide | CAGGTGCAGCTGGTGCAATCTGGGGCTGAGGTGAAGAAGCCT |
| | | | GGGGCCTCAGTGAAGGTTTCCTGCAAGGCATCTGGATACACCT |
| | | | TCACCAGTTACTATATGCACTGGGTGCGACAGGCCCCTGGACA |
| | | | AGGGCTTGAGTGGATGGGAATAATCAACCCTAGTGGTGGTAG |
| | | | CACAAGCTACGCACAGAAGTTCCAGGGCAGAGTCACCATGAC |
| | | | CAGGGACACGTCAACGAACACAGTCTACATGGAGCTGAGCAG |
| | | | CCTTCGATCTGAGGACACGGCCGTGTATTACTGTGCGAGAGAT |
| | | | CCCGAGTATAGCAGTGCTTTTGATATCTGGGGACAAGGGACAA |
| | | | TGGTCACCGTCTCCTCA |
| 272 | ATX-P-583 | VL | DIQMTQSPSSLSASVGDRVTITCRASQNIGSYLNWYQQKPGNAPK |
| | | | LLIYATSTLQSGVPSRFSGSGSGTDFTLUISSLHPEDFTVYYCQQSFI |
| | | | IPFTFGPGTKVDIK |
| 273 | ATX-P-591 | VL | DIQMTQSPSSLSASVGDRVTITCRASQSINTYLNWYQQKPGKAPK |
| | | | LLIYAASSLQSGVPSRFSGSGSGTDFTLTISSLQPEDFATYSCQHSF |
| | | | TTPFTFGPGTKLEIK |
| 274 | ATX-P-602 | VL | EIVLTQSPGTLSLSPGERATLSCRASQSVSSSYLAWYQQKPGQAP |
| | | | RLLIYGASSRATGIPDRFSGSGSGTQFTLTISSLQSEDFAVYYCQQ |
| | | | YGSSPWTFGQGTKVDIK |
| 275 | ATX-P-597 | VL | DIQMTQSPSSLSASIGDRVTITCRASQSISSYLDWYQRKSGKAPKL |
| | | | LIYAASSLQSGVPSRFSGSGSGTDFTLTISSLQPEDFATYYCQQSYS |
| | | | TPLTFGGGTKVDIK |
| 276 | ATX-P-601 | VL | DIQMTQSPSSLSASVGDRVTITCRASQSINIYLNWYQQKPEKDPKL |
| | | | LIYAASSLQSGVPSRFSGSGSGTDFTLTISNLQPEDFATYYCQQSY |
| | | | STPITFGQGTRLEIK |
| 277 | ATX-P-607 | VL | DIQMTQSPSSLSASVGDRGTITCRASQSIRSYLNWYQQKPGKAPK |
| | | | LLIYAASSLQSGVPSRFSGSGSGTDFTLTISSLQPEDFATYYCQQSY |
| | | | RTPVTFGPGTKVDIK |
| 278 | ATX-P-583 | VL - nucleotide | GACATCCAGATGACCCAGTCTCCGTCCTCCCTGTCTGCATCTGT |
| | | | AGGAGACAGAGTCACCATCACTTGCCGGGCAAGTCAGAACAT |
| | | | TGGCAGTTATTTAAATTGGTATCAGCAGAAACCAGGGAATGCC |
| | | | CCTAAACTCCTGATCTATGCTACATCCACTTTGCAAAGTGGGG |
| | | | TCCCATCAAGGTTCAGTGGCAGTGGATCTGGGACAGATTTCAC |
| | | | TCTCATCATCAGCAGTCTGCACCCTGAAGATTTTACAGTTTATT |
| | | | ACTGTCAACAGAGTTTCATTATCCCATTCACTTTCGGCCCTGGG |
| | | | ACCAAAGTGGATATCAAA |
| 279 | ATX-P-591 | VL - nucleotide | GACATCCAGATGACTCAGTCTCCATCCTCCCTGTCTGCATCTGT |
| | | | TGGAGACAGAGTCACCATCACTTGCCGGGCAAGTCAGAGCAT |
| | | | TAACACCTATTTAAATTGGTATCAGCAGAAACCAGGGAAAGC |
| | | | CCCTAAGCTCCTGATCTATGCTGCATCCAGTTTGCAAAGTGGG |
| | | | GTCCCATCAAGGTTCAGTGGCAGTGGATCTGGGACAGATTTCA |
| | | | CTCTCACCATCAGCAGTCTGCAACCTGAAGATTTTGCAACTTA |
| | | | CTCCTGTCAACATAGTTTCACTACCCCATTCACTTTCGGCCCTG |
| | | | GGACCAAGCTGGAAATCAAA |
| 280 | ATX-P-602 | VL - nucleotide | GAAATTGTGTTGACGCAGTCTCCAGGCACCCTGTCTTTGTCTCC |
| | | | AGGGGAAAGAGCCACCCTCTCCTGCAGGGCCAGTCAGAGTGT |
| | | | TAGCAGCAGCTACTTAGCCTGGTACCAGCAGAAACCTGGCCA |
| | | | GGCTCCCAGGCTCCTCATCTATGGTGCATCCAGTAGGGCCACT |
| | | | GGCATCCCAGACAGGTTCAGTGGCAGTGGGTCTGGGACACAG |
| | | | TTCACTCTCACCATCAGCAGCCTGCAGTCTGAAGATTTTGCAG |
| | | | TTTATTACTGTCAGCAGTATGGTAGCTCACCGTGGACGTTCGG |
| | | | CCAAGGGACCAAAGTGGATATCAAA |
| 281 | ATX-P-597 | VL - nucleotide | GACATCCAGATGACCCAGTCTCCATCCTCCCTGTCTGCATCTAT |
| | | | TGGAGACAGAGTCACCATCACTTGCCGGGCAAGTCAGAGCAT |
| | | | TAGCAGCTATTTAGATTGGTATCAGCGGAAATCAGGGAAAGC |
| | | | CCCTAAACTCCTGATCTATGCTGCATCCAGTTTGCAAAGTGGG |
| | | | GTCCCATCAAGGTTCAGTGGCAGTGGATCTGGGACAGATTTCA |
| | | | CTCTCACCATCAGCAGTCTGCAACCTGAAGATTTTGCAACTTA |
| | | | CTACTGTCAACAGAGTTACAGTACCCCGCTCACTTTCGGQGGA |
| | | | GGGACCAAAGTGGATATCAAA |
| 282 | ATX-P-601 | VL - nucleotide | GACATCCAGATGACCCAGTCTCCATCCTCCCTGTCTGCATCTGT |
| | | | AGGAGACAGAGTCACCATCACTTGCCGGGCAAGTCAGAGCAT |
| | | | TAATATCTATTTAAATTGGTATCAGCAGAAACCAGAGAAAGAC |
| | | | CCTAAGCTCCTGATCTATGCTGCGTCCAGTTTGCAAAGTGGGG |
| | | | TCCCATCAAGGTTCAGTGGCAGTGGATCTGGGACAGATTTCAC |
| | | | TCTCACCATCAGCAATCTGCAACCTGAAGATTTTGCAACTTAC |
| | | | TACTGTCAACAGAGTTACAGTACCCCGATCACCTTCGGCCAAG |
| | | | GGACACGACTGGAGATTAAA |
| 283 | ATX-P-607 | VL - nucleotide | GACATCCAGATGACACAGTCTCCATCCTCCCTGTCTGCATCTG |
| | | | TAGGAGACAGAGGCACCATCACTTGCCGGGCAAGTCAGAGCA |
| | | | TTAGAAGTTATTTAAATTGGTATCAGCAGAAACCAGGGAAAG |
| | | | CCCCTAAACTCCTGATCTATGCTGCATCCAGTTTGCAAAGTGG |
| | | | GGTCCCATCAAGGTTCAGTGGCAGTGGATCTGGGACAGATTTC |
| | | | ACTCTCACCATCAGCAGTCTGCAACCTGAAGATTTTGCAACTT |
| | | | ACTACTGTCAACAGAGTTACAGAACCCCAGTCACTTTCGGCCC |
| | | | TGGGACCAAAGTGGATATCAAA |
| 284 | ATX-P-564 | VH | EVQLVESGGGLVKPGGSLRLSCAASGFTFSSYTMNWVRQAPGKG |
| | | | LEWVSSISSSSSYTYYADSVRGRFTISRDNAKNSLYLQMSSLRAE |
| | | | DTAVYYCARSASIAAGMDVWGKGTTVTVSS |
| 285 | ATX-P-568 | VH | EVQLVESGGGLVQPGGSLRLSCAASGFPFSSYVMSWVRQAPGKG |
| | | | LEWVSVISVSGGSTFYADSVRGRFTISRDNSKNTLYLQVYSLRAE |
| | | | DTAVYYCAKDGLAVAGFDHWGQGTLVTVSS |
| 286 | ATX-P-574 | VH | EVQLVESGGGLVQRGGSLRLSCVASGFTFSSYAMSWVRQAPGKG |
| | | | LEWVSVISGSGGTTYYADSVKGRFTISRDDSKKTL YLQMNSLRAE |
| | | | DTAVYYCAKRGDYGDYMDVWGKGTTVTVSS |
| 287 | ATX-P-565 | VH | QVQLVESGGGVVQPGRSLRLSCAASGFTFNTYGIHWVRQAPGKG |
| | | | LEWVAVIWHDGSSKNYVDSVTGRFTISRDNSKNTVYLQMNSLRA |
| | | | EDTAVYYCARRGNWNYGFYYYYMDVWGKGTTVTVSS |
| 288 | ATX-P-578 | VH | EVQLVESGGGLVQPGGSLRLSCAASGFTFSRYSMNWVRQAPGKG |
| | | | LEWVSYISSSSSTIFHADSVKGRFTISRDNAKNSLYLQMNSLRDED |
| | | | TAVYYCARGNWNYYYMDVWGKGTTVTVSS |
| 289 | ATX-P-569 | VH | EVQLVESGGGLAQFGRSLRLSCAASGFTFDDYAMHWLRQAPGM |
| | | | GLEWVSGISWNSGSIGYADSVKGRFTIARDNAKNSVHLQMNSLR |
| | | | AEDTALYYCAKDIGNGYTKGDVFDIWGQGTMVTVSS |
| 290 | ATX-P-576 | VH | EVQLVESGGGLVQPGRSLRLSCTASGFTEDDYEMHWVRQAPGK |
| | | | GLEWVSDISRNSGRIGYADSVKGRFTISRDNAKNSLYLQMNSLRA |
| | | | EDTALYYCAKDIWGSGYFDYWGQGILVTVSS |
| 291 | ATX-P-588 | VH | EVQLVESGGGLVQPGRSLRLSCAASGFTFEDYAMHWVRQAPGK |
| | | | GLEWVSGISWNSGSIGYADSVKGRFTISRDNAKKSLYLQMNSLR |
| | | | AEDTALYYCTKDRDDGYNYAGVFDYWGQGTLVTVSS |
| 292 | ATX-P-596 | VH | EVQLVESGGGLVQPGRSLRLSCAASGFSEDDYAMHWVRQVPGK |
| | | | GLEWVSGISWTGGSVGYADPVKGRFTISRDNAKNSLYLQMNSLR |
| | | | PEDTALYYCAKDMGDGYSRNWPFDYWGQGTLVTVSS |
| 293 | ATX-P-600 | VH | EVQLVESGGGLVQPGRSLRLSCAASGFTFDDYAMHWVRQVPGR |
| | | | GLEWVSGISWSGGSIGYADSVKGRFTISRDNSKNSLYLQMNSLRA |
| | | | EDTALYYCTKDREDGYNYGGVFDYWGQGTLVTVSS |
| 294 | ATX-P-564 | VH - nucleotide | GAGGTGCAGCTGGTGGAGTCTGGGGGAGGCCTGGTCAAGCCT |
| | | | GGGGGGTCCCTGAGACTCTCCTGTGCAGCCTCTGGATTCACCT |
| | | | TCAGTAGCTATACCATGAACTGGGTCCGCCAGGCTCCAGGGAA |
| | | | GGGGCTGGAGTGGGTGTCATCCATTAGTAGTAGTAGTAGTTAC |
| | | | ACATACTACGCAGACTCAGTGAGGGGCCGATTCACCATCTCCA |
| | | | GAGACAACGCCAAGAACTCACTGTATCTGCAAATGAGCAGCC |
| | | | TGAGAGCCGAGGACACAGCTGTGTATTACTGTGCGAGATCGG |
| | | | CGAGTATAGCAGCTGGGATGGACGTCTGGGGCAAAGGGACCA |
| | | | CGGTCACCGTCTCCTCA |
| 295 | ATX-P-568 | VH - nucleotide | GAGGTGCAGCTGGTGGAGTCTGGGGGAGGCTTGGTACAGCCG |
| | | | GGGGGGTCCCTGAGACTCTCCTGTGCAGCCTCTGGATTCCCCT |
| | | | TTAGCAGCTATGTCATGAGCTGGGTCCGCCAGGCTCCAGGGAA |
| | | | GGGGCTGGAGTGGGTCTCAGTTATAAGTGTTAGTGGTGGTAGT |
| | | | ACATTCTACGCAGACTCCGTGAGGGGCCGGTTCACCATCTCCA |
| | | | GAGACAATTCCAAGAACACGCTGTATCTGCAAGTGTACAGCCT |
| | | | GCGAGCCGAGGACACGGCCGTATATTACTGTGCGAAAGATGG |
| | | | TTTGGCAGTGGCTGGTTTTGACCACTGGGGCCAGGGAACCCTG |
| | | | GTCACCGTCTCCTCA |
| 296 | ATX-P-574 | VH - nucleotide | GAGGTGCAGCTGGTGGAGTCTGGGGGAGGCTTGGTACAGCGG |
| | | | GGGGGGTCCCTGAGACTCTCCTGTGTAGCCTCTGGATTCACCT |
| | | | TTAGTAGCTATGCCATGAGCTGGGTCCGCCAGGCTCCAGGGAA |
| | | | GGGGCTGGAGTGGGTCTCAGTTATTAGTGGTAGTGGTGGTACC |
| | | | ACATACTACGCAGACTCCGTGAAGGGCCGGTTCACCATCTCCA |
| | | | GAGACGATTCCAAGAAGACACTGTATCTGCAAATGAACAGCC |
| | | | TGAGAGCCGAGGACACGGCCGTATATTATTGTGCGAAAAGGG |
| | | | GTGACTACGGGGACTACATGGACGTCTGGGGCAAAGGGACCA |
| | | | CGGTCACCGTCTCCTCA |
| 297 | ATX-P-565 | VH - nucleotide | CAGGTGCAGCTGGTGGAGTCTGGGGGAGGCGTGGTCCAGCCT |
| | | | GGGAGGTCCCTGAGACTCTCCTGTGCAGCGTCTGGATTCACCT |
| | | | TCAATACCTATGGCATCCACTGGGTCCGCCAGGCTCCAGGCAA |
| | | | GGGACTGGAGTGGGTGGCAGTTATATGGCATGATGGAAGTAG |
| | | | TAAAAACTATGTAGACTCCGTGACGGGCCGATTCACCATCTCC |
| | | | AGAGACAATTCCAAGAACACGGTGTATCTGCAAATGAACAGC |
| | | | CTGAGAGCCGAGGACACGGCTGTTTATTACTGTGCGAGAAGG |
| | | | GGTAACTGGAACTACGGCTTCTACTACTACTACATGGACGTCT |
| | | | GGGGCAAAGGAACCACGGTCACCGTCTCCTCA |
| 298 | ATX-P-578 | VH - nucleotide | GAGGTGCAGCTGGTGGAGTCTGGGGGAGGTTTGGTACAGCCT |
| | | | GGGGGGTCCCTGAGACTCTCCTGTGCAGCCTCTGGATTCACCT |
| | | | TCAGTAGATATAGCATGAACTGGGTCCGCCAGGCTCCAGGGA |
| | | | AGGGGCTGGAGTGGGTTTCATACATTAGTAGTAGTAGTAGTAC |
| | | | CATTTTCCATGCAGACTCTGTGAAGGGCCGATTCACCATCTCC |
| | | | AGAGACAATGCCAAGAACTCACTGTACCTGCAAATGAACAGC |
| | | | CTGAGAGACGAGGACACGGCTGTGTATTACTGTGCGAGAGGG |
| | | | AACTGGAACTACTACTACATGGACGTCTGGGGCAAAGGGACC |
| | | | ACGGTCACCGTCTCCTCA |
| 299 | ATX-P-569 | VH - nucleotide | GAAGTGCAGCTGGTGGAGTCTGGGGGAGGCTTGGCACAGTTT |
| | | | GGCAGGTCCCTGAGACTCTCCTGTGCAGCCTCTGGATTCACCT |
| | | | TTGATGATTATGCCATGCACTGGCTCCGGCAAGCTCCAGGGAT |
| | | | GGGCCTGGAGTGGGTCTCAGGTATTAGTTGGAATAGCGGGAG |
| | | | CATAGGCTATGQGGACTCTGTGAAGGGCCGATTCACCATCGCC |
| | | | AGAGACAACGCCAAGAACTCCGTGCATCTGCAAATGAACAGT |
| | | | CTGAGAGCTGAGGACACGGCCTTGTATTACTGTGCAAAAGATA |
| | | | TAGGAAATGGATATACGAAGGGTGATGTTTTTGATATCTGGGG |
| | | | ACAAGGGACAATGGTCACCGTCTCTTCA |
| 300 | ATX-P-576 | VH - nucleotide | GAAGTGCAGCTGGTGGAGTCTGGGGGAGGCTTGGTACAGCCT |
| | | | GGCAGGTCCCTGAGACTCTCCTGTACAGCCTCTGGATTCACAT |
| | | | TTGATGATTATGAAATGCACTGGGTCCGGCAAGCTCCAGGGAA |
| | | | GGGCCTGGAGTGGGTCTCAGATATTAGTCGGAACAGTGGTAG |
| | | | AATAGGCTATGCGGACTCTGTGAAGGGCCGATTCACCATTTCC |
| | | | AGAGACAACGCCAAGAACTCCCTGTATCTACAAATGAACAGT |
| | | | CTGAGAGCTGAGGACACGGCCTTGTATTACTGTGCAAAAGATA |
| | | | TTTGGGGATCGGGGTACTTTGACTATTGGGGCCAGGGAATCCT |
| | | | GGTCACCGTCTCCTCA |
| 301 | ATX-P-588 | VH - nucleotide | GAAGTGCAGCTGGTGGAGTCCGGGGGAGGCTTGGTACAACCT |
| | | | GGCAGGTCCCTGAGACTCTCCTGTGCAGCCTCTGGATTCACCT |
| | | | TTGAAGATTATGCCATGCACTGGGTCCGGCAAGCTCCAGGGAA |
| | | | GGGCCTGGAGTGGGTCTCAGGTATTAGTTGGAATAGTGGTAGC |
| | | | ATAGGCTATGCGGACTCTGTGAAGGGCCGATTCACCATCTCCA |
| | | | GAGACAACGCCAAGAAATCCCTGTATCTGCAAATGAACAGTC |
| | | | TGAGAGCTGAGGACACGGCCTTATATTACTGTACAAAAGATA |
| | | | GAGATGATGGCTACAACTATGCGGGGGTCTTTGACTACTGGGG |
| | | | CCAGGGAACCCTGGTCACTGTCTCCTCA |
| 302 | ATX-P-596 | VH - nucleotide | GAAGTGCAGCTGGTGGAGTCTGGGGGAGGCTTGGTACAGCCT |
| | | | GGCAGGTCCCTGAGACTCTCCTGTGCAGCCTCTGGGTTCAGTT |
| | | | TTGATGATTATGCCATGCACTGGGTCCGGCAAGTTCCAGGGAA |
| | | | GGGCCTGGAATGGGTCTCAGGTATTAGTTGGACTGGTGGTAGC |
| | | | GTAGGCTATGCGGACCCCGTGAAGGGCCGATTCACCATCTCCA |
| | | | GAGACAACGCCAAGAACTCCCTGTATCTGCAAATGAACAGTCT |
| | | | GAGACCTGAGGACACGGCCTTGTATTACTGTGCAAAAGATATG |
| | | | GGAGACGGGTATAGCAGAAACTGGCCCTTTGACTACTGGGGC |
| | | | CAGGGAACCCTGGTCACCGTCTCCTCA |
| 303 | ATX-P-600 | VH - nucleotide | GAAGTGCAGCTGGTGGAGTCTGGGGGAGGCTTGGTACAGCCT |
| | | | GGCAGGTCCCTGAGACTCTCCTGTGCAGCCTCTGGATTCACCT |
| | | | TTGATGATTATGCCATGCACTGGGTCCGGCAAGTTCCAGGGAG |
| | | | GGGCCTGGAGTGGGTCTCAGGTATTAGTTGGAGTGGTGGCAGC |
| | | | ATAGGCTATGCGGACTCTGTGAAGGGCCGATTCACCATCTCCA |
| | | | GAGACAACTCCAAGAACTCCCTGTATCTGCAAATGAACAGTCT |
| | | | GAGAGCTGAGGACACGGCCTTGTATTACTGTACAAAAGATAG |
| | | | AGAAGATGGATACAACTATGGGGGGGTCTTTGACTACTGGGG |
| | | | CCAGGGAACCCTGGTCACCGTCTCCTCA |
| 304 | ATX-P-564 | VL | DIVMTQSPLSLPVTPGEPASISCRSSQSLLHSTGYNFLDWYLQKPG |
| | | | LSPQLLIYLASNRASGVPDRFSGSGSGTDFTLKISRVEAEDVGVYY |
| | | | CMQALQTPYTFGQGTKLEIK |
| 305 | ATX-P-568 | VL | DIQMTQSPSTLSASVGDRVTITCRASQSISTWLAWYQQKPGKAPK |
| | | | LLIHKASGLESGVPSRFSGSGSGTEFTLTISSLQPDDFATYYCQQY |
| | | | NSFSLIFGGGTRVEIK |
| 306 | ATX-P-574 | VL | DIQMTQSPSSVSASVGDRVTITCRASQGITTWLAWYQQKPGKAP |
| | | | KLLIFGASSLESGVPSRFSGSGSGTDFTLTISSLQPEDFATYYCQQA |
| | | | NSFPWTFGQGTKVEIK |
| 307 | ATX-P-565 | VL | DIVMTQSPLSLPVTPGEPASISCRSSQRLLHSSGYNYLDWYLQKPG |
| | | | QSPQLLIYLGSSRASGVPDRFSGSGSGTDFTLKISRVEAEDVGVYY |
| | | | CMQGLQTPPTFGQGTKVEIK |
| 308 | ATX-P-578 | VL | DIQMTQSPSTLSASVGDRVTISCRASQSVNSWLAWYQQKPGKAP |
| | | | KLLIYKASNLEGGVPSSFSGSGSGTEFTLTISSLQPDDFATYYCQQ |
| | | | YDTSWTFGQGTKVEIK |
| 309 | ATX-P-569 | VL | DIQMTQSPSTLSASVGDSVTITCRASQNIITWLAWYQQKPGKAPN |
| | | | LLIYKASSLESGVPSRFSGSGSGTEFTLTISSLQPDDFATYYCQQYS |
| | | | SYSYTFGQGTKLEIK |
| 310 | ATX-P-576 | VL | DIQMTQSPSSVSASVGDRVTITCRTSQGIRNWLAWYQQKPGKAP |
| | | | KLLIYAASSLQTGGPSRFSGSGSGTDFTLTISSLQPEDFATYYCQQ |
| | | | ANSFPYTFGQGTKLEIK |
| 311 | ATX-P-588 | VL | EIVLTQSPATLSVSPGERATLSCRASQSVSSNLAWYQQKPGQAPR |
| | | | LLIYGASSRATGIPDRFSGSGSGTDFTLTISRLEPEDFAVYYCQQY |
| | | | GSSFTFGPGTKVDIK |
| 312 | ATX-P-596 | VL | DIVMTQSPDSLAVSLGERATINCKSSQSVLYSSNNKNYLAWYQQ |
| | | | KPGQPPKLLIYWASTRESGVPDRFSGSGSGTDFTLTISSLQAEDVA |
| | | | VYYCQQYGSSPMYTFGQGTKLEIK |
| 313 | ATX-P-600 | VL | EIVLTQSPGTLSLSPGERATLSCRASQNVRGSYLAWYQQKPGQAP |
| | | | RLLIYGASNRATDIPDRFSGSGSGTDFTLTISGLEPEDFVVYYCQQ |
| | | | YGSSYTFGQGTKVEIK |
| 314 | ATX-P-564 | VL - nucleotide | GATATTGTGATGACTCAGTCTCCACTCTCCCTGCCCGTCACCCC |
| | | | TGGAGAGCCGGCCTCCATCTCCTGCAGGTCTAGTCAGAGCCTC |
| | | | CTGCATAGTACTGGATACAACTTTTTGGATTGGTACCTGCAGA |
| | | | AGCCAGGGCTGTCTCCACAGCTCCTGATCTATTTGGCTTCTAAT |
| | | | CGGGCCTCCGGGGTCCCTGACAGGTTCAGTGGCAGTGGATCAG |
| | | | GCACAGATTTTACACTGAAAATCAGCAGAGTGGAGGCTGAGG |
| | | | ATGTTGGGGTTTATTACTGCATGCAAGCTCTACAAACTCCGTA |
| | | | CACTTTTGGCCAGGGGACCAAGCTGGAGATCAAA |
| 315 | ATX-P-568 | VL - nucleotide | GACATCCAGATGACCCAGTCTCCTTCCACCCTGTCTGCCTCTGT |
| | | | AGGAGACAGAGTCACCATCACTTGCCGGGCCAGCCAGAGTAT |
| | | | TAGTACCTGGTTGGCCTGGTATCAGCAGAAACCAGGGAAAGC |
| | | | CCCTAAGCTCCTGATCCATAAGGCGTCTGGTTTAGAAAGTGGG |
| | | | GTCCCATCAAGATTCAGCGGCAGTGGATCTGGGACAGAATTCA |
| | | | CTCTCACCATCAGCAGCCTGCAGCCTGATGATTTTGCAACTTA |
| | | | TTACTGCCAACAGTATAATAGTTTTTCTCTCATTTTCGGCGGAG |
| | | | GGACCAGGGTGGAGATCAAA |
| 316 | ATX-P-574 | VL - nucleotide | GACATCCAGATGACCCAGTCTCCATCTTCCGTGTCTGCATCTGT |
| | | | AGGAGACAGAGTCACCATCACTTGTCGGGCGAGTCAGGGTAT |
| | | | TACCACCTGGTTAGCCTGGTATCAGCAGAAACCAGGGAAAGC |
| | | | CCCTAAGCTCCTGATCTTTGGTGCATCTAGTTTGGAAAGTGGG |
| | | | GTCCCATCAAGGTTCAGCGGCAGTGGATCTGGGACAGATTTCA |
| | | | CTCTCACCATCAGCAGCCTGCAGCCTGAAGATTTTGCAACTTA |
| | | | CTATTGTCAACAGGCTAACAGTTTCCCGTGGACGTTCGGCCAA |
| | | | GGGACCAAGGTGGAAATCAAA |
| 317 | ATX-P-565 | VL - nucleotide | GATATTGTGATGACTCAGTCTCCACTCTCCCTGCCCGTCACCCC |
| | | | TGGAGAGCCGGCCTCCATCTCCTGCAGGTCTAGTCAGCGCCTC |
| | | | CTGCATAGTAGTGGATACAATTATTTGGATTGGTATCTGCAGA |
| | | | AGCCAGGACAGTCTCCACAGCTCCTGATCTATTTGGGTTCTAG |
| | | | TCGGGCCTCCGGGGTCCCTGACAGGTTCAGTGGCAGTGGATCA |
| | | | GGCACAGATTTTACACTGAAAATCAGCAGGGTGGAGGCTGAG |
| | | | GATGTTGGGGTTTATTACTGCATGCAAGGTCTACAAACTQCTC |
| | | | CGACGTTCGGCCAAGGGACCAAGGTGGAAATCAAA |
| 318 | ATX-P-578 | VL - nucleotide | GACATCCAGATGACCCAGTCTCCTTCCACCCTGTCTGCATCTGT |
| | | | AGGAGACAGAGTCACCATCAGTTGCCGGGCCAGTCAGAGTGT |
| | | | TAATAGCTGGTTGGCCTGGTATCAGCAGAAACCAGGGAAAGC |
| | | | CCCTAAACTCCTGATCTATAAGGCGTCTAATTTAGAAGGTGGG |
| | | | GTCCCATCAAGTTTCAGCGGCAGTGGATCTGGGACAGAATTCA |
| | | | CTCTCACCATCAGCAGCCTGCAGCCTGATGATTTTGCAACTTA |
| | | | TTACTGCCAACAATATGATACTTCTTGGACGTTCGGCCAAGGG |
| | | | ACCAAGGTGGAGATCAAA |
| 319 | ATX-P-569 | VL - nucleotide | GACATCCAGATGACCCAGTCTCCTTCCACCCTGTCTGCATCTGT |
| | | | AGGAGACAGCGTCACCATCACTTGCCGGGCCAGTCAGAATATT |
| | | | ATTACCTGGTTGGCTTGGTATCAGCAGAAACCAGGGAAAGCCC |
| | | | CTAACCTCCTGATCTATAAGGCGTCTAGTTTAGAAAGTGGGGT |
| | | | CCCATCAAGGTTCAGCGGCAGTGGATCTGGGACAGAATTCACT |
| | | | CTCACCATCAGCAGCCTGCAGCCTGATGATTTTGCAACTTATT |
| | | | ACTGCCAACAGTATAGTAGTTATTCGTACACTTTTGGCCAGGG |
| | | | GACCAAGCTGGAGATCAAA |
| 320 | ATX-P-576 | VL - nucleotide | GACATCCAGATGACCCAGTCTCCATCTTCCGTGTCTGCATCTGT |
| | | | AGGAGACAGAGTCACCATCACTTGTCGGACGAGTCAGGGTAT |
| | | | TAGAAACTGGTTAGCCTGGTATCAGCAGAAACCAGGGAAAGC |
| | | | CCCTAAACTCCTGATCTATGCTGCATCCAGTTTGCAAACTGGG |
| | | | GGCCCATCAAGGTTCAGCGGCAGTGGATCTGGGACAGATTTCA |
| | | | CTCTCACCATCAGCAGCCTGCAGCCTGAAGATTTTGCAACTTA |
| | | | CTATTGTCAACAGGCTAACAGTTTCCCGTACACTTTTGGCCAG |
| | | | GGGACCAAGCTGGAGATCAAA |
| 321 | ATX-P-588 | VL - nucleotide | GAAATTGTGTTGACGCAGTCTCCAGCCACCCTGTCTGTGTCTC |
| | | | CAGGGGAAAGAGCCACCCTCTCCTGCAGGGCCAGTCAGAGTG |
| | | | TTAGCAGCAACTTAGCCTGGTACCAGCAGAAACCTGGCCAGG |
| | | | CTCCCAGGCTCCTCATCTATGGTGCATCCAGCAGGGCCACTGG |
| | | | CATCCCAGACAGGTTCAGTGGCAGTGGGTCTGGGACAGACTTC |
| | | | ACTCTCACCATCAGCAGACTGGAGCCTGAAGATTTTGCAGTGT |
| | | | ATTACTGTCAGCAGTATGGTAGCTCATTCACTTTCGGCCCTGG |
| | | | GACCAAAGTGGATATCAAA |
| 322 | ATX-P-596 | VL - nucleotide | GACATCGTGATGACTCAGTCTCCAGACTCCCTGGCTGTGTCTC |
| | | | TGGGCGAGAGGGCCACCATCAACTGCAAGTCCAGCCAGAGTG |
| | | | TTTTATACAGCTCCAACAATAAGAACTACTTAGCTTGGTACCA |
| | | | GCAGAAACCAGGACAGCCTCCTAAGCTGCTCATTTACTGGGCA |
| | | | TCTACCCGGGAATCCGGGGTCCCTGACCGATTCAGTGGCAGCG |
| | | | GGTCTGGGACAGATTTCACTCTCACCATCAGCAGCCTGCAGGC |
| | | | TGAAGATGTGGCAGTTTATTACTGTCAGCAGTATGGTAGCTCA |
| | | | CCCATGTACACTTTTGGCCAGGGGACCAAGCTGGAGATCAAA |
| 323 | ATX-P-600 | VL - nucleotide | GAAATTGTGTTGACGCAGTCTCCAGGCACCCTGTCTTTGTCTCC |
| | | | AGGGGAAAGAGCCACCCTCTCCTGCAGGGCCAGTCAGAATGT |
| | | | TAGGGGCAGCTACTTAGCCTGGTACCAGCAGAAACCTGGCCA |
| | | | GGCTCCCAGGCTCCTCATATATGGTGCATCCAACAGGGCCACT |
| | | | GACATCCCAGACAGGTTCAGTGGCAGTGGGTCTGGGACAGAC |
| | | | TTCACTCTCACCATCAGCGGCCTGGAGCCTGAAGATTTTGTAG |
| | | | TGTATTACTGTCAGCAGTATGGTAGTTCGTACACTTTTGGCCA |
| | | | GGGGACCAAGGTGGAGATCAAA |
| 324 | ATX-P-571 | VH | QVQLQESGPGLVKPSGTLSLTCAVSGGSISSRNWWSWVRQPPGK |
| | | | GLEWIGEIYHGGTTNYNPSLKSRVTISVDKSKNQFSLKLSSVTAA |
| | | | DTAVYYCARGGLRLGELSPNAFDIWGQGTMVTVSS |
| 325 | ATX-P-577 | VH | QVQLQESGPGLVKPSGTLSLTCAVSGGSISSSNWWTWVRQPPGK |
| | | | GLEWIGETYHDGSTNYNPSLKSRVTISVDKSKNQFSLKLSSVTAA |
| | | | DTAVYYCLEFYFDYWGQGTLVTVSS |
| 326 | ATX-P-579 | VH | QVQLQESGPGLVKPSGTLSLTCAVSGASISTSNWWTWVRQPPGK |
| | | | GLEWIGEIYHDGSTNYSPSLQSRVTISVDKSKNQFSLTLTSVTAAD |
| | | | TAIYYCGDFYIDVWGNGTTVTVSS |
| 327 | ATX-P-580 | VH | QVQLQESGPGLVKPSGTLSLTCAVSGGSISTSDWWTWVRQPPGK |
| | | | GLEWIGEIYHSGSTNYNPSLKSRVTISVDKSKNQFSLKLSSVTAAD |
| | | | TAVYYCADWYFDLWGRGTLVTVSS |
| 328 | ATX-P-582 | VH | QVQLQESGPGLVKPSGTLSLTCAVSGGSISISKWWSWVRQPPGKG |
| | | | LEWIGEIYHTGSTNYHPSLKSRVTISVDKSKNQFYLKLNSVTAAD |
| | | | TAVYYCARDELRLGELSPSLDIWGQGTMVTVSS |
| 329 | ATX-P-598 | VH | QVQLQESGPGLVKPSGTLSLTCAVSGGSISSSNWWSWVRQSPGK |
| | | | GLEWIGEIYHSGTTNYNPSLKSRVTISVDKSKNQFSLKLSSATAAD |
| | | | TAVYYCARDRLRLGESSSDVFDIWGQGTMVTVSS |
| 330 | ATX-P-603 | VH | QVQLQESGPGLVKPSGTLSLTCAVSGGSISGSHWWSWFRQPPGK |
| | | | GLEWIGEIYHTGSTNKNPSLKSRVTISLDKSKNQFSLRLRSVIDAD |
| | | | TAVYYCARDQYTGSPRDAFDIWGQGTMVTVSS |
| 331 | ATX-P-608 | VH | QVQLQESGPGLVKPSGTLSLTCAVSGGSISSSNWWSWVRQSPGK |
| | | | GLEWIGEIYHTGSTNKKPSLKSRVIISVDKSKNQFSLKLISVNAAD |
| | | | TAIYYCARDREGGTTEAFDIWGQGTMVTVSS |
| 332 | ATX-P-609 | VH | QVQLQESGPGLVKPSGTLSLTCAVSGGSISSSNWWSWVRQPPGK |
| | | | GLEWIGEIYHSGSTNYNPSLKSRVTISVDKSKNQFSLKLRSVTAAD |
| | | | TAVYYCARDQLSSGPTDAFDIWGQGTMVTVSS |
| 333 | ATX-P-563 | VH | QVQLQESGPGLMKPSETLSLTCTVSGGSISSHYWSWIRQPPGKGL |
| | | | EWIGYIFYSGNINYNPSLKSRVTISVDTSKNQFSLKLRSVTTADTA |
| | | | VYYCARDRGGSYSYHFDCWGQGTLVTVSS |
| 334 | ATX-P-570 | VH | QVQLQESGPGLVKPSETMSLTCTVSGGSFTGYYWSWIRQPPGKG |
| | | | LEWIGYVHYSGGTKSNPSLKSRVTISVDTSKNQFSLKLSSVTAAD |
| | | | TAVYYCARERYEWNSYFDYWGQGTLVTVSS |
| 335 | ATX-P-571 | VH - nucleotide | CAGGTGCAGCTGCAGGAGTCGGGCCCAGGACTGGTGAAGCCT |
| | | | TCGGGGACCCTGTCCCTCACCTGTGCTGTCTCGGGTGGCTCCA |
| | | | TCAGTAGTCGTAACTGGTGGAGTTGGGTCCGCCAGCCCCCAGG |
| | | | GAAGGGGCTGGAGTGGATTGGGGAAATCTATCATGGTGGGAC |
| | | | CACCAACTACAACCCGTCCCTTAAGAGTCGAGTCACCATATCA |
| | | | GTAGACAAGTCCAAGAACCAATTCTCCCTGAAGCTGAGTTCTG |
| | | | TGACCGCCGCGGACACGGCCGTGTATTACTGTGCGAGAGGGG |
| | | | GATTACGTTTGGGGGAGTTATCGCCTAATGCTTTTGATATCTG |
| | | | GGGACAAGGGACAATGGTCACCGTCTCTTCA |
| 336 | ATX-P-577 | VH - nucleotide | CAGGTGCAGCTGCAGGAGTCGGGCCCAGGACTGGTGAAGCCT |
| | | | TCGGGGACCCTGTCCCTCACCTGCGCTGTCTCTGGTGGCTCCAT |
| | | | CAGCAGTAGTAACTGGTGGACTTGGGTCCGCCAGCCCCCAGG |
| | | | GAAGGGGCTGGAGTGGATTGGGGAAACCTATCATGATGGGAG |
| | | | CACCAACTACAACCCGTCCCTCAAGAGTCGAGTCACCATTTCA |
| | | | GTAGACAAGTCCAAGAACCAATTCTCCCTGAAACTGAGTTCTG |
| | | | TGACCGCCGCGGACACGGCCGTGTATTACTGTTTGGAATTCTA |
| | | | CTTTGACTACTGGGGCCAGGGAACCCTGGTCACCGTCTCCTCA |
| 337 | ATX-P-579 | VH - nucleotide | CAGGTGCAGCTGCAGGAGTCGGGCCCAGGACTGGTGAAGCCT |
| | | | TCGGGGACCCTGTCCCTCACCTGCGCTGTGTCTGGTGCCTCCAT |
| | | | CAGCACAAGTAATTGGTGGACTTGGGTCCGCCAGCCCCCAGG |
| | | | GAAGGGGCTGGAGTGGATTGGTGAAATCTATCATGATGGGAG |
| | | | CACCAACTACAGCCCGTCCCTCCAGAGTCGAGTCACCATATCA |
| | | | GTAGACAAGTCCAAGAACCAGTTCTCCCTGACGCTGACCTCTG |
| | | | TGACCGCCGCGGACACGGCCATTTATTATTGTGGTGACTTCTA |
| | | | CATAGACGTCTGGGGCAACGGGACCACGGTCACCGTCTCCTCA |
| 338 | ATX-P-580 | VH - nucleotide | CAGGTGCAGCTGCAGGAGTCGGGCCCAGGACTGGTGAAGCCT |
| | | | TCGGGGACCCTGTCCCTCACCTGCGCTGTCTCTGGTGGCTCCAT |
| | | | CAGCACTAGTGACTGGTGGACTTGGGTCCGCCAGCCCCCAGGG |
| | | | AAGGGGCTGGAGTGGATTGGGGAAATCTATCATAGTGGGAGC |
| | | | ACCAACTACAACCCGTCCCTCAAGAGTCGAGTCACCATATCAG |
| | | | TAGACAAATCCAAGAACCAGTTCTCCCTGAAGCTGAGCTCTGT |
| | | | GACCGCCGCGGACACGGCCGTGTATTACTGTGCGGACTGGTAC |
| | | | TTCGATCTCTGGGGCCGTGGCACCCTGGTCACTGTCTCCTCA |
| 339 | ATX-P-582 | VH - nucleotide | CAGGTGCAGCTGCAGGAGTCGGGCCCAGGACTGGTGAAGCCT |
| | | | TCGGGGACCCTGTCCCTCACCTGCGCTGTGTCTGGTGGCTCCA |
| | | | TCAGCATTAGTAAATGGTGGAGTTGGGTCCGCCAGCCCCCAGG |
| | | | GAAGGGACTGGAGTGGATTGGGGAAATCTATCATACTGGGAG |
| | | | CACCAACTACCACCCGTCCCTCAAGAGCCGAGTCACCATATCA |
| | | | GTAGACAAGTCCAAGAACCAATTCTACCTGAAGCTGAACTCTG |
| | | | TGACCGCCGCGGACACGGCCGTATATTACTGTGCGAGAGATG |
| | | | AATTACGGTTGGGGGAGTTATCGCCCTCTCTTGATATCTGGGG |
| | | | ACAAGGGACAATGGTCACCGTCTCTTCA |
| 340 | ATX-P-598 | VH - nucleotide | CAGGTGCAGCTGCAGGAGTCGGGCCCAGGACTGGTGAAGCCT |
| | | | TCGGGGACCCTGTCCCTCACCTGCGCTGTCTCTGGTGGCTCCAT |
| | | | CAGCAGTAGTAACTGGTGGAGTTGGGTCCGCCAGTCCCCAGG |
| | | | GAAGGGGCTGGAATGGATTGGGGAAATCTATCATAGTGGGAC |
| | | | CACCAACTACAACCCGTCCCTCAAGAGTCGAGTCACCATATCA |
| | | | GTAGACAAGTCCAAGAACCAGTTCTCCCTGAAGCTGAGCTCTG |
| | | | CGACCGCCGCGGACACGGCCGTGTATTATTGTGCGAGAGATA |
| | | | GATTACGTTTGGGGGAGTCATCGTCCGATGTTTTTGATATCTG |
| | | | GGGACAAGGGACAATGGTCACCGTCTCTTCA |
| 341 | ATX-P-603 | VH - nucleotide | CAGGTGCAGCTGCAGGAGTCGGGCCCAGGACTGGTGAAGCCT |
| | | | TCGGGGACCCTGTCCCTCACCTGCGCTGTCTCTGGTGGCTCCAT |
| | | | CAGCGGTAGTCACTGGTGGAGTTGGTTCCGCCAGCCCCCAGGA |
| | | | AAGGGGCTGGAGTGGATTGGGGAAATCTATCATACTGGGAGC |
| | | | ACCAACAAAAACCCGTCCCTCAAGAGTCGAGTCACTATCTCAT |
| | | | TAGACAAGTCCAAGAATCAGTTCTCCCTGAGGCTGAGGTCTGT |
| | | | GACCGACGCGGACACGGCCGTGTATTACTGTGCGAGAGATCA |
| | | | GTATACTGGGAGCCCAAGGGATGCTTTTGATATCTGGGGACAA |
| | | | GGGACAATGGTCACCGTCTCCTCA |
| 342 | ATX-P-608 | VH - nucleotide | CAGGTGCAGCTGCAGGAGTCGGGCCCAGGACTGGTGAAGCCT |
| | | | TCGGGGACCCTGTCCCTCACCTGCGCTGTCTCTGGTGGCTCCAT |
| | | | CAGCAGTAGTAACTGGTGGAGTTGGGTCCGCCAGTCCCCAGG |
| | | | GAAGGGGCTGGAGTGGATTGGGGAAATCTATCATACTGGGAG |
| | | | CACCAACAAAAAACCGTCCCTCAAGAGTCGAGTCATCATATCA |
| | | | GTAGACAAGTCCAAGAACCAGTTCTCCCTGAAACTGATCTCTG |
| | | | TGAACGCCGCGGACACGGCCATATATTACTGTGCGAGAGATC |
| | | | GGGAAGGGGGAACTACTGAAGCTTTTGATATCTGGGGACAAG |
| | | | GGACAATGGTCACCGTCTCTTCA |
| 343 | ATX-P-609 | VH - nucleotide | CAGGTGCAGCTGCAGGAGTCGGGCCCAGGACTGGTGAAGCCT |
| | | | TCGGGGACCCTGTCCCTCACCTGCGCTGTCTCTGGTGGCTCCAT |
| | | | CAGCAGTAGTAACTGGTGGAGTTGGGTCCGCCAGCCCCCAGG |
| | | | GAAGGGGCTGGAGTGGATTGGGGAAATCTATCATAGTGGGAG |
| | | | CACCAACTACAACCCGTCCCTCAAGAGTCGAGTCACCATATCA |
| | | | GTAGACAAGTCCAAGAACCAGTTCTCCCTGAAGCTGAGGTCTG |
| | | | TGACCGCCGCGGACACGGCCGTTTATTACTGTGCGAGAGATCA |
| | | | ACTAAGTAGCGGACCTACGGATGCTTTTGATATCTGGGGACAA |
| | | | GGGACAATGGTCACCGTCTCTTCA |
| 344 | ATX-P-563 | VH - nucleotide | CAGGTGCAGCTGCAGGAGTCGGGCCCAGGACTGATGAAGCCT |
| | | | TCGGAGACCCTGTCCCTCACCTGCACTGTCTCTGGTGGCTCCAT |
| | | | CAGTAGTCACTACTGGAGCTGGATCCGGCAACCCCCAGGGAA |
| | | | GGGACTGGAGTGGATTGGATATATCTTTTACAGTGGGAACATA |
| | | | AATTACAACCCCTCCCTCAAGAGTCGAGTCACCATATCAGTAG |
| | | | ACACGTCCAAGAACCAGTTCTCCCTGAAGCTGAGGTCTGTGAC |
| | | | CACTGCGGACACGGCCGTATATTACTGTGCGAGAGATCGAGGT |
| | | | GGGAGCTATTCGTACCACTTTGACTGCTGGGGCCAGGGAACCC |
| | | | TGGTCACCGTCTCCTCA |
| 345 | ATX-P-570 | VH - nucleotide | CAGGTGCAGCTGCAGGAGTCGGGCCCAGGACTGGTGAAGCCT |
| | | | TCGGAGACTATGTCCCTCACCTGCACTGTCTCTGGTGGCTCCTT |
| | | | CACTGGATACTACTGGAGTTGGATCCGGCAGCCCCCAGGGAA |
| | | | GGGACTGGAGTGGATTGGATATGTCCATTACAGTGGGGGCAC |
| | | | CAAAAGCAACCCCTCCCTCAAGAGTCGAGTCACCATATCAGTA |
| | | | GACACGTCCAAGAACCAGTTTTCCCTGAAGCTGAGCTCTGTGA |
| | | | CCGCTGCGGACACGGCCGTGTATTACTGTGCGAGAGAGAGGT |
| | | | ATGAGTGGAACTCCTACTTTGACTACTGGGGCCAGGGAACCCT |
| | | | GGTCACCGTCTCCTCA |
| 346 | ATX-P-571 | VL | DIQMTQSPSSLSASVGDRVTITCRASQSISSYLNWYQQKPGKAPK |
| | | | VLIYAASSLQSGIPSRFSGSGSGTDFTLTISSLQPEDFATYYCQETY |
| | | | SVPLTFGGGTKVEIK |
| 347 | ATX-P-577 | VL | DIQMTQSPSSLSASVGDRVTITCRASQDIRNDLGWYQQKPGKVPK |
| | | | RLIYAASSLQSGVPSRFSGSGSGTEFTLTISSLQPEDFASYYCLQYN |
| | | | NYPFTLGPGTKVDIK |
| 348 | ATX-P-579 | VL | DIQMTQSPSSLSASVGDRVTITCRASQGIRKDLGWYQQKPGKAPK |
| | | | RLIYTASTLQSGVPSRFSGSGSGTEFTLTISSLQPEDFATYYCLQYN |
| | | | NYPFTFGPGTKVDIK |
| 349 | ATX-P-580 | VL | DIQMTQSPSSLSASVGDRVTITCRASQGIRNDLGWYQQKPGKAPK |
| | | | RLIYAASSLQSGVPSRFSGSGSGTEFTLAISSLQPEDFATYYCLHEN |
| | | | SYPFTFGPGTK VDIK |
| 350 | ATX-P-582 | VL | DIQMTQSPSSLSASVGDRVTITCRASQNINNYLNWFRQKPGKAPK |
| | | | LLIFAASSLQSGVPSRFSGSESGTDFTLTISSLQPEDFATYYCQQSY |
| | | | STPLTFGGGTK VEIK |
| 351 | ATX-P-598 | VL | DIVMTQSPDSLAVSLGERATINCKSSQSVLYSSNNKNYLAWYQQ |
| | | | KPGQPPELLIYWASTRESGVPDRFSGSGSGTDFTLTISSLQAEDMA |
| | | | VYYCQQFYNTPYTFGQGTKVDIK |
| 352 | ATX-P-603 | VL | EIVLTQSPGTLSLSPGERATLSCRASQSVSSSYLAWYQQKPGQAP |
| | | | RLLIYGASSRATGIPDRFSGSGSGTDFTLTISRLEPEDFAVYYCQH |
| | | | YGNSPLTFGGGTKVEIK |
| 353 | ATX-P-608 | VL | EIVMTQSPATLSVSPGERATLSCRASQSVSSNLAWYQQKPGQAPR |
| | | | LLIYGASTRATGIPVRFSGSGSGTQFTLTISSLQSEDFAVYYCQQY |
| | | | DNWRTFGQGTRLEIK |
| 354 | ATX-P-609 | VL | EIVMTQSPATLSVSPGERATLSCRASQSVSSNLAWYQQKPGQAPR |
| | | | LLIYGASTRATGIPVRFSGSGSGTQFTLTISSLQSEDFAVYYCQQY |
| | | | DNWRTFGQGTKLEIK |
| 355 | ATX-P-563 | VL | DIQMTQSPSSVSASVGDRVTITCRASQSFAGWLAWYQQKPGKAP |
| | | | KLLIYAASTLQSGVPSRFSGSGSGTDFTLTISSLQPEDFATYYCQQ |
| | | | ANSFPLTFGGGTKVEIK |
| 356 | ATX-P-570 | VL | DIVMTQSPDSLAVSLGERATINCKSSQSVLYSSNNKNYLAWYHQ |
| | | | KPGQPPKLLIYWASTRESGVPDRFSGSGSGTDFTLTISSLQAEDVA |
| | | | VYYCQQYYSSPRTFGQGTKVEIK |
| 357 | ATX-P-571 | VL - nucleotide | GACATCCAGATGACCCAGTCTCCATCCTCCCTGTCTGCATCTGT |
| | | | GGGAGACAGAGTCACCATCACTTGCCGGGCAAGTCAGAGCAT |
| | | | TAGCAGCTATTTAAATTGGTATCAGCAGAAACCAGGGAAAGC |
| | | | CCCTAAGGTCCTGATCTATGCTGCATCCAGTTTGCAGAGTGGG |
| | | | ATCCCATCACGGTTCAGTGGCAGTGGATCTGGGACAGATTTCA |
| | | | CTCTCACCATCAGCAGTCTGCAACCTGAAGATTTTGCAACTTA |
| | | | CTACTGTCAAGAGACTTACAGTGTTCCGCTCACTTTCGGCGGA |
| | | | GGGACCAAGGTGGAGATCAAA |
| 358 | ATX-P-577 | VL - nucleotide | GACATCCAGATGACCCAGTCTCCATCCTCCCTGTCTGCATCTGT |
| | | | AGGAGACAGAGTCACCATCACTTGCCGGGCAAGTCAGGACAT |
| | | | TAGAAATGATTTAGGCTGGTATCAGCAGAAACCAGGGAAAGT |
| | | | CCCTAAGCGCCTGATCTATGCTGCATCTAGTTTGCAAAGTGGG |
| | | | GTCCCATCAAGGTTCAGCGGCAGTGGATCTGGGACAGAATTCA |
| | | | CTCTCACAATCAGCAGCCTGCAGCCTGAAGATTTCGCAAGTTA |
| | | | TTACTGTCTACAGTATAATAATTATCCATTCACTCTCGGCCCTG |
| | | | GGACCAAAGTGGATATCAAA |
| 359 | ATX-P-579 | VL - nucleotide | GACATCCAGATGACCCAGTCTCCATCCTCCCTGTCTGCATCTGT |
| | | | AGGAGACAGAGTCACCATCACTTGCCGGGCAAGTCAGGGCAT |
| | | | TAGAAAAGATTTAGGCTGGTATCAGCAGAAACCAGGGAAAGC |
| | | | CCCTAAGCGCCTGATCTATACTGCATCCACTTTACAAAGTGGG |
| | | | GTCCCATCAAGGTTCAGCGGCAGTGGATCTGGGACAGAATTCA |
| | | | CTCTCACAATCAGCAGCCTGCAGCCTGAAGATTTTGCAACTTA |
| | | | TTACTGTCTACAGTATAATAATTACCCATTCACTTTCGGCCCTG |
| | | | GGACCAAAGTGGATATCAAA |
| 360 | ATX-P-580 | VL - nucleotide | GACATCCAGATGACCCAGTCTCCATCCTCCCTGTCTGCTTCTGT |
| | | | CGGAGACAGAGTCACCATCACTTGCCGGGCAAGTCAGGGCAT |
| | | | TAGAAATGATTTAGGCTGGTATCAGCAGAAACCAGGGAAAGC |
| | | | CCCTAAGCGCCTGATCTATGCTGCATCCAGTTTGCAAAGTGGG |
| | | | GTCCCATCAAGGTTCAGCGGCAGTGGATCTGGGACAGAATTCA |
| | | | CTCTCGCAATCAGCAGCCTGCAGCCTGAAGATTTTGCAACTTA |
| | | | TTACTGTCTACACTTTAATAGTTACCCATTCACTTTCGGCCCTG |
| | | | GGACCAAAGTGGATATCAAA |
| 361 | ATX-P-582 | VL - nucleotide | GACATCCAGATGACCCAGTCTCCATCCTCCCTGTCTGCATCTGT |
| | | | AGGAGACAGAGTCACCATCACTTGCCGGGCAAGTCAGAACAT |
| | | | TAACAACTATTTAAATTGGTTCCGGCAGAAACCAGGGAAAGC |
| | | | CCCTAAGCTCCTGATCTTTGCTGCATCCAGTTTACAAAGTGGG |
| | | | GTCCCATCAAGATTCAGTGGCAGTGAATCTGGGACAGATTTCA |
| | | | CTCTCACCATCAGCAGTCTGCAACCTGAGGATTTTGCGACTTA |
| | | | CTACTGTCAACAGAGTTACAGTACCCCTCTCACTTTCGGCGGA |
| | | | GGGACCAAGGTGGAGATCAAA |
| 362 | ATX-P-598 | VL - nucleotide | GACATCGTGATGACTCAGTCTCCAGACTCCCTGGCTGTGTCTC |
| | | | TGGGCGAGAGGGCCACCATCAACTGCAAGTCCAGCCAGAGTG |
| | | | TTTTATACAGCTCCAACAATAAGAACTACTTAGCTTGGTACCA |
| | | | GCAGAAACCAGGACAGCCTCCTGAGCTGCTCATTTACTGGGCA |
| | | | TCTACCCGGGAATCCGGGGTCCCTGACCGATTCAGTGGCAGCG |
| | | | GGTCTGGGACAGATTTCACTCTCACCATCAGCAGCCTGCAGGC |
| | | | TGAAGATATGGCAGTTTATTACTGTCAACAATTTTATAATACT |
| | | | CCGTACACTTTTGGCCAGGGGACCAAAGTGGATATCAAA |
| 363 | ATX-P-603 | VL - nucleotide | GAAATTGTGTTGACGCAGTCTCCAGGCACCCTGTCTTTGTCTCC |
| | | | AGGGGAAAGAGCCACCCTCTCCTGCAGGGCCAGTCAGAGTGT |
| | | | TAGCAGCAGCTACTTAGCCTGGTACCAGCAGAAACCTGGCCA |
| | | | GGCTCCCAGGCTCCTCATCTATGGTGCATCCAGCAGGGCCACT |
| | | | GGCATCCCAGACAGGTTCAGTGGCAGTGGGTCTGGGACAGAC |
| | | | TTCACTCTCACCATCAGCAGACTGGAGCCTGAAGATTTTGCAG |
| | | | TGTATTACTGTCAGCATTATGGTAACTCACCGCTCACTTTCGGC |
| | | | GGAGGGACCAAGGTGGAGATCAAA |
| 364 | ATX-P-608 | VL - nucleotide | GAAATAGTGATGACGCAGTCTCCAGCCACCCTGTCTGTGTCTC |
| | | | CAGGGGAAAGAGCCACCCTCTCCTGCAGGGCCAGTCAGAGTG |
| | | | TTAGCAGCAACTTAGCCTGGTACCAGCAGAAACCTGGCCAGG |
| | | | CTCCCAGGCTCCTCATCTATGGTGCATCCACCAGGGCCACTGG |
| | | | TATCCCAGTCAGGTTCAGTGGCAGTGGGTCTGGGACACAGTTC |
| | | | ACTCTCACCATCAGCAGCCTGCAGTCTGAAGATTTTGCAGTTT |
| | | | ATTATTGTCAGCAATATGATAACTGGCGGACGTTCGGCCAAGG |
| | | | GACACGACTGGAGATTAAA |
| 365 | ATX-P-609 | VL - nucleotide | GAAATAGTGATGACGCAGTCTCCAGCCACCCTGTCTGTGTCTC |
| | | | CAGGGGAAAGAGCCACCCTCTCCTGCAGGGCCAGTCAGAGTG |
| | | | TTAGCAGCAACTTAGCCTGGTACCAGCAGAAACCTGGCCAGG |
| | | | CTCCCAGGCTCCTCATCTATGGTGCATCCACCAGGGCCACTGG |
| | | | TATCCCAGTCAGGTTCAGTGGCAGTGGGTCTGGGACACAGTTC |
| | | | ACTCTCACCATCAGCAGCCTGCAGTCTGAAGATTTTGCAGTTT |
| | | | ATTATTGTCAGCAATATGATAACTGGCGGACGTTCGGCCAAGG |
| | | | GACCAAGCTGGAAATCAAA |
| 366 | ATX-P-563 | VL - nucleotide | GACATCCAGATGACCCAGTCTCCATCTTCCGTGTCTGCATCTGT |
| | | | CGGAGACAGAGTCACCATCACTTGTCGGGCGAGTCAGAGTTTT |
| | | | GCCGGCTGGTTAGCCTGGTATCAGCAGAAACCAGGGAAAGCC |
| | | | CCTAAGCTCCTGATATATGCTGCATCCACTTTGCAAAGTGGGG |
| | | | TCCCATCAAGGTTCAGCGGCAGTGGATCTGGGACAGATTTCAC |
| | | | TCTCACCATCAGCAGCCTGCAGCCTGAAGATTTTGCAACTTAC |
| | | | TATTGTCAACAGGCTAACAGTTTCCCTCTCACTTTCGGCGGAG |
| | | | GGACCAAGGTGGAGATCAAA |
| 367 | ATX-P-570 | VL - nucleotide | GACATCGTGATGACCCAGTCTCCAGACTCCCTGGCTGTGTCTC |
| | | | TGGGCGAGAGGGCCACCATCAACTGCAAGTCCAGTCAGAGTG |
| | | | TTTTATACAGCTCCAACAATAAGAATTACTTAGCTTGGTACCA |
| | | | CCAGAAACCAGGACAGCCTCCTAAGCTGCTCATTTACTGGGCA |
| | | | TCTACCCGGGAATCCGGGGTCCCTGACCGATTCAGTGGCAGCG |
| | | | GGTCTGGGACAGATTTCACTCTCACCATCAGCAGCCTGCAGGC |
| | | | TGAAGATGTGGCAGTTTATTACTGTCAGCAATACTATAGTAGT |
| | | | CCTCGGACGTTCGGCCAAGGGACCAAGGTGGAAATCAAA |
| 368 | ATX-P-560 | VH | QVQLQQSGPGLVKPSQTLSLTCAISGDSVSSNTAAWNWIRQSPSR |
| | | | GLEWLGRTYYRSKWYNDYAVSVKSRITINPDTSKNQFSLQLSSVT |
| | | | PQDTAIYYCASDNWNNGGPGFDPWGQGTLVTVSS |
| 369 | ATX-P-561 | VH | QVQLQQSGPGLVKPSQTLSLTCAISGDSVSSNSAAWNWIRQSPSR |
| | | | GLEWLGRTYYRSKWYNGYAVSMKSRITINPDTSKNQFSLQLNSV |
| | | | TPEDTAMYYCAREGVGATTGFDYWGQGTLVTVSS |
| 370 | ATX-P-562 | VH | QVQLQQSGPGLVKSSQTLSLTCAISGDTVSSNSAAWNWIRQSPSR |
| | | | GLEWLGRTFYRSRWSAAYAASVSSRITINPDTSKNQFSLQLTSVT |
| | | | PADTAVYYCAREGVGSSTGFDYWGQGTLVTVSS |
| 371 | ATX-P-566 | VH | QVQLQQSGPGLVKPSQTLSLTCAISGDSVSSNSAAWNWIRQSPSR |
| | | | GLEWLGRTYYRSKWFNNYSVSVKSRIAINPDTSKNQFSLQLNSVT |
| | | | PEDTAVYYCARDLGELLDWYFDLWGRGTLVTVSA |
| 372 | ATX-P-572 | VH | QVQLQQSGPGLVKPSQTLSLTCAISGDSVSSNSAAWNWIRQSPSR |
| | | | GLEWLGMTYYRSKWYSVFAVSVKSRITINTDTSKNQFSLQLNSV |
| | | | TPEDTAVYYCAREGGIVGATPFDYWGQGTLVTVSS |
| 373 | ATX-P-573 | VH | QVQLQQSGPGLVKPSQTLSLTCAISGDSVSSNSAAWNWIRQSPSR |
| | | | GLEWLGRTYYRSKLYSDYAVSVKSRITINPDTSRNQFSLQLNSVT |
| | | | PEDTAVYYCAREGGYTYGYDYWGQGTLVTVSS |
| 374 | ATX-P-581 | VH | QVQLQQSGPGLVKPSQTLSLTCAISGDSVSSNNAAWNWIRQSPSR |
| | | | GLEWLGRTYYRSKWYNAYAVSVKSRIUINPDTSRNQFSLQLNSVT |
| | | | PEDTAVYYCAREGGYIYGLDQWGQGTLVTVSS |
| 375 | ATX-P-587 | VH | QVQLQQSGPGLVKPSQTLSLTCAISGDSVSSNSAAWNWIRQSPSR |
| | | | GLEWLGKTYYRSKWYNYYALSVKSRITINPDTSKNQFSLHLNSV |
| | | | TPEDTAVYYCARDGDYYLPSPFDLWGHGTMVTVSS |
| 376 | ATX-P-592 | VH | QVQLQQSGPGLVKPSQTLSLTCAISGDSVSSNSAAWNWIRQSPSR |
| | | | GLEWLGRTYYRSKWYSDYPLSVKSRITINPDTSKNQFSLQLNSVT |
| | | | PEDTAVYYCARDSGIVETTPFDYWGQGTLVTVSS |
| 377 | ATX-P-594 | VH | QVQLQQSGPGLVKPSQTLSLTCAISGDSVSSNSASWNWIRQSPSR |
| | | | GLEWLGTTYYRSKWFNVYAVSVKSRITINPDTSKNQFSLHLNSVT |
| | | | PEDTAIYFCTRDRGDLLHWYFDLWGRGTLVTVSS |
| 378 | ATX-P-595 | VH | QVQLQQSGPGLVKPSQTLSLTCAISGDSVSSNSAAWNWIRQSPSR |
| | | | GLEWLGRTYYRSKWFNDYALSVKSRITINPDTSKNQFSLHLNSVT |
| | | | PEDTAVYYCAREPGIVAPGPFDYWGQGTLVTVSS |
| 379 | ATX-P-604 | VH | QVQLQQSGPGLVKPTQTLSLTCAISGDSVSSNSAAWNWIRQSPSR |
| | | | GLEWLGRTYYRSKWFNGYAVSVKSRITINPDASKNQFSLHLKSV |
| | | | TDEDTAVYYCATDRGELLHWYFDLWGRGTLVTVSS |
| 380 | ATX-P-610 | VH | QVQLQQSGPGLVKSSQTLSITCAISGDSVSSNSAAWNWIRQSPSR |
| | | | GLEWLGRTYYRSKWYNDYALSVKSRIIIKSDTSKNQFSLQLNSVT |
| | | | PEDTAVYYCAREPGIAAPGPFDYWGQGSLVTVSS |
| 381 | ATX-P-560 | VH - nucleotide | CAGGTACAGCTGCAGCAGTCAGGTCCAGGACTGGTGAAGCCC |
| | | | TCGCAGACCCTCTCACTCACCTGTGCCATTTCCGGGGACAGTG |
| | | | TCTCTAGCAACACTGCTGCTTGGAACTGGATCAGGCAGTCCCC |
| | | | ATCGAGAGGCCTTGAGTGGCTGGGAAGGACATACTACAGGTC |
| | | | CAAGTGGTATAATGATTATGCAGTATCTGTGAAAAGTCGAATA |
| | | | ACCATCAACCCAGACACATCCAAGAACCAGTTCTCCCTGCAGT |
| | | | TGAGCTCTGTGACTCCCCAGGACACGGCTATATATTACTGTGC |
| | | | GAGCGATAACTGGAACAACGGAGGCCCTGGGTTCGACCCCTG |
| | | | GGGCCAGGGAACCCTGGTCACCGTCTCCTCA |
| 382 | ATX-P-561 | VH - nucleotide | CAGGTACAGCTGCAGCAGTCAGGTCCAGGACTGGTGAAGCCC |
| | | | TCGCAGACCCTCTCACTCACCTGTGCCATCTCCGGGGACAGTG |
| | | | TCTCTAGCAACAGTGCTGCTTGGAACTGGATCAGGCAGTCCCC |
| | | | ATCGAGAGGCCTTGAGTGGCTGGGAAGGACATACTACAGGTC |
| | | | CAAGTGGTATAATGGTTATGCAGTCTCTATGAAAAGTCGAATA |
| | | | ACCATCAACCCAGACACATCCAAGAACCAGTTCTCCCTGCAGC |
| | | | TGAACTCTGTGACTCCCGAGGACACGGCTATGTATTATTGTGC |
| | | | AAGAGAGGGAGTGGGAGCTACTACAGGCTTTGACTACTGGGG |
| | | | CCAGGGAACCCTGGTCACCGTCTCCTCA |
| 383 | ATX-P-562 | VH - nucleotide | CAGGTACAGCTGCAGCAGTCAGGTCCAGGACTGGTGAAGTCC |
| | | | TCGCAGACCCTCTCACTCACCTGTGCCATCTCCGGGGACACTG |
| | | | TCTCTAGTAATAGTGCTGCTTGGAACTGGATCAGGCAGTCCCC |
| | | | ATCGAGAGGCCTTGAGTGGCTGGGAAGGACATTCTATAGGTCC |
| | | | AGGTGGTCTGCTGCTTATGCAGCGTCTGTGAGTAGTCGAATAA |
| | | | CCATCAACCCAGACACATCCAAGAACCAGTTCTCCCTGCAGCT |
| | | | GACCTCTGTGACTCCCGCGGACACGGCTGTGTATTACTGTGCA |
| | | | AGAGAGGGAGTAGGATCTTCTACAGGCTTTGACTACTGGGGCC |
| | | | AGGGAACCCTGGTCACCGTCTCCTCA |
| 384 | ATX-P-566 | VH - nucleotide | CAGGTACAGCTGCAGCAGTCAGGTCCAGGACTGGTGAAGCCC |
| | | | TCGCAGACCCTCTCACTCACCTGTGCCATCTCCGGGGACAGTG |
| | | | TCTCTAGCAACAGTGCTGCTTGGAACTGGATCAGGCAGTCCCC |
| | | | ATCGAGAGGCCTTGAGTGGCTGGGAAGGACATACTACAGGTC |
| | | | CAAGTGGTTTAATAATTATTCAGTTTCTGTGAAAAGTCGAATA |
| | | | GCCATTAACCCAGACACATCCAAGAACCAGTTCTCCCTTCAAC |
| | | | TGAACTCTGTGACTCCCGAGGACACGGCTGTGTATTACTGTGC |
| | | | AAGAGATCTGGGGGAGTTACTTGACTGGTACTTQGATCTCTGG |
| | | | GGCCGTGGCACCCTGGTCACTGTCTCCGCA |
| 385 | ATX-P-572 | VH - nucleotide | CAGGTACAGCTGCAGCAGTCAGGTCCAGGACTGGTGAAGCCC |
| | | | TCGCAGACCCTCTCACTCACCTGTGCCATCTCCGGGGACAGTG |
| | | | TCTCTAGCAACAGTGCTGCTTGGAACTGGATCAGGCAGTCCCC |
| | | | ATCGAGAGGCCTTGAGTGGCTGGGAATGACATACTACAGGTC |
| | | | CAAGTGGTATAGTGTTTTTGCAGTATCTGTGAAAAGTCGAATA |
| | | | ACCATCAATACAGACACATCCAAGAACCAGTTCTQCCTGCAGC |
| | | | TGAACTCTGTGACTCCCGAGGACACGGCTGTGTATTACTGTGC |
| | | | AAGAGAGGGGGGTATAGTGGGAGCCACCCCCTTTGACTACTG |
| | | | GGGCCAGGGAACCCTGGTCACCGTCTCTTCA |
| 386 | ATX-P-573 | VH - nucleotide | CAGGTACAGCTGCAGCAGTCAGGTCCAGGACTGGTGAAGCCC |
| | | | TCGCAGACCCTCTCACTCACCTGTGCCATCTCCGGGGACAGTG |
| | | | TCTCTAGCAACAGTGCTGCTTGGAACTGGATCAGGCAGTCCCC |
| | | | ATCGAGAGGCCTTGAGTGGCTGGGCAGGACATACTACAGGTC |
| | | | CAAGTTGTATAGTGATTATGCAGTATCTGTGAAAAGTCGAATA |
| | | | ACCATCAACCCAGACACATCCAGGAACCAGTTCTCCCTGCAGC |
| | | | TGAACTCTGTGACTCCCGAGGACACGGCTGTGTATTACTGTGC |
| | | | AAGAGAGGGGGGATACACCTATGGTTATGACTACTGGGGCCA |
| | | | GGGAACCCTGGTCACCGTCTCCTCA |
| 387 | ATX-P-581 | VH - nucleotide | CAGGTACAGCTGCAGCAGTCAGGTCCAGGACTGGTGAAGCCC |
| | | | TCGCAGACCCTCTCACTCACCTGTGCCATCTCCGGGGACAGTG |
| | | | TCTCTAGCAACAATGCTGCTTGGAACTGGATCAGGCAGTCCCC |
| | | | ATCGAGAGGCCTTGAGTGGCTGGGAAGGACGTACTACAGGTC |
| | | | CAAGTGGTATAATGCTTATGCAGTTTCTGTGAAAAGTCGAATT |
| | | | ATCATCAATCCAGACACATCCAGGAACCAGTTCTCCCTGCAAC |
| | | | TGAACTCTGTGACTCCCGAGGACACGGCTGTGTATTACTGTGC |
| | | | AAGAGAGGGTGGATACATCTATGGTCTTGACCAATGGGGCCA |
| | | | GGGAACCCTGGTCACCGTCTCCTCA |
| 388 | ATX-P-587 | VH - nucleotide | CAGGTGCAGCTGCAGCAGTCGGGTCCAGGACTGGTGAAGCCC |
| | | | TCGCAGACCCTCTCACTCACCTGTGCCATCTCCGGGGACAGTG |
| | | | TCTCTAGCAACAGTGCTGCTTGGAACTGGATCAGGCAGTCCCC |
| | | | ATCGAGAGGCCTTGAGTGGCTGGGAAAGACATACTACAGGTC |
| | | | CAAGTGGTATAATTATTATGCACTATCTGTGAAAAGTCGAATA |
| | | | ACCATCAACCCAGACACATCCAAGAACCAGTTCTQCCTGCACC |
| | | | TGAACTCTGTGACTCCCGAGGACACGGCTGTGTATTACTGTGC |
| | | | AAGAGACGGTGACTACTACCTTCCCTCTCCTTTTGATCTCTGGG |
| | | | GCCACGGGACAATGGTCACCGTCTCCTCA |
| 389 | ATX-P-592 | VH - nucleotide | CAGGTACAGCTGCAGCAGTCAGGTCCAGGACTGGTGAAGCCC |
| | | | TCGCAGACCCTCTCACTCACCTGTGCCATCTCCGGGGACAGTG |
| | | | TCTCTAGCAACAGTGCTGCTTGGAACTGGATCAGGCAGTCCCC |
| | | | ATCGAGAGGCCTTGAGTGGCTGGGAAGGACATACTACAGGTC |
| | | | CAAGTGGTATAGTGATTATCCACTATCTGTGAAAAGTCGAATA |
| | | | ACCATCAACCCCGACACATCCAAGAACCAGTTCTCCCTGCAGC |
| | | | TGAACTCTGTGACTCCCGAGGACACGGCTGTGTATTACTGTGC |
| | | | AAGAGACTCCGGTATAGTTGAAACCACGCCCTTTGACTATTGG |
| | | | GGCCAGGGAACCCTGGTCACCGTCTCCTCA |
| 390 | ATX-P-594 | VH - nucleotide | CAGGTACAGCTGCAGCAGTCAGGTCCAGGACTGGTGAAGCCC |
| | | | TCGCAGACCCTCTCACTCACCTGTGCCATCTCCGGGGACAGTG |
| | | | TCTCTAGTAACAGTGCTTCTTGGAACTGGATCAGGCAGTCCCC |
| | | | TTCGAGAGGCCTTGAGTGGCTGGGAACGACATACTACAGGTCC |
| | | | AAGTGGTTTAATGTTTATGCAGTCTCTGTGAAAAGTCGAATAA |
| | | | CCATCAACCCAGACACATCCAAGAACCAATTCTCCCTGCACCT |
| | | | GAACTCTGTGACTCCCGAGGACACGGCTATATATTTCTGTACA |
| | | | AGAGATQGGGGGGACCTACTCCACTGGTACTTCGATCTCTGGG |
| | | | GCCGTGGCACCCTGGTCACTGTCTCCTCA |
| 391 | ATX-P-595 | VH - nucleotide | CAGGTACAGCTGCAGCAGTCGGGTCCAGGACTGGTGAAGCCC |
| | | | TCGCAGACCCTCTCACTCACCTGTGCCATCTCCGGGGACAGTG |
| | | | TCTCTAGCAACAGTGCTGCTTGGAACTGGATCAGGCAGTCCCC |
| | | | ATCGAGAGGCCTTGAGTGGCTGGGAAGGACATACTACAGGTC |
| | | | CAAGTGGTTTAATGATTATGCACTATCTGTGAAAAGTCGAATA |
| | | | ACCATCAACCCAGACACATCCAAGAACCAGTTCTCCCTGCACC |
| | | | TGAACTCTGTGACTCCCGAGGACACGGCTGTGTATTACTGTGC |
| | | | AAGAGAACCTGGTATAGTAGCACCTGGCCCTTTTGACTACTGG |
| | | | GGCCAGGGAACCCTGGTCACCGTCTCCTCA |
| 392 | ATX-P-604 | VH - nucleotide | CAGGTACAGCTGCAGCAGTCAGGTCCAGGACTGGTGAAGCCC |
| | | | ACGCAGACCCTCTCACTCACCTGTGCCATCTCCGGGGACAGTG |
| | | | TCTCTAGCAACAGTGCTGCATGGAACTGGATCAGGCAGTCCCC |
| | | | ATCGAGAGGCCTTGAGTGGCTGGGGAGGACATACTACAGGTC |
| | | | CAAGTGGTTTAATGGTTATGCAGTATCTGTGAAAAGTCGAATA |
| | | | ACCATCAACCCCGACGCATCCAAGAACCAGTTCTCCCTGCACT |
| | | | TGAAGTCTGTGACTGACGAGGACACGGCTGTATATTACTGTGC |
| | | | AACAGATCGGGGGGAACTCCTCCACTGGTACTTCGATCTCTGG |
| | | | GGCCGTGGCACCCTGGTCACCGTCTCTTCA |
| 393 | ATX-P-610 | VH - nucleotide | CAGGTACAGCTGCAGCAGTCAGGTCCAGGACTGGTGAAGTCC |
| | | | TCGCAGACCCTCTCAATCACCTGTGCCATCTCCGGGGACAGTG |
| | | | TCTCTAGCAACAGTGCTGCTTGGAACTGGATCAGGCAGTCCCC |
| | | | ATCGAGAGGCCTTGAGTGGCTGGGAAGGACATACTACAGGTC |
| | | | CAAGTGGTATAATGATTATGCACTATCTGTGAAAAGTCGAATA |
| | | | ATCATCAAGTCAGACACATCCAAGAACCAGTTCTCCCTGCAGT |
| | | | TGAACTCTGTGACTCCCGAGGACACGGCTGTGTACTACTGTGC |
| | | | AAGAGAACCGGGTATAGCAGCACCTGGTCCATTTGACTACTGG |
| | | | GGCCAGGGATCCCTGGTCACCGTCTCCTCA |
| 394 | ATX-P-560 | VL | DIQMTQSPSSVSTSVGDRVTITCRASQGISSWLAWYQQKPGKAPK |
| | | | LLISAASSLQSGVPSRFSGSGSGTDFTLTISTLQPEDFASYYCQQAN |
| | | | SFPPTFGQGTRVEIK |
| 395 | ATX-P-561 | VL | DIQMTQSPSSLSASVGDRVTITCRASQGISSWLTWYQQKPGK.APK |
| | | | LLIYAASSLQGGVPSRFSGSGSGTDFTLTISSLQPEDFATYYCQQA |
| | | | NSFPPTFGQGTK VEIK |
| 396 | ATX-P-562 | VL | DIQMTQSPSSVSASIGDRVTITCRASKGISIWLAWYQQKPGKAPK |
| | | | VLISAASSLQSGAPSRFSGSGSGTDFTLTISSLQPEDFATYYCQQA |
| | | | NSFPPTFGQGTKVEIK |
| 397 | ATX-P-566 | VL | EIVLTQSPGTLSLSPGDRATLSCRASQSVRNSYVAWYQQKPGQAP |
| | | | RLLIYGASSRATGIPDRFSGSGSGTDFSLTIGRLEPEDFVVYYCQQ |
| | | | YGNSPLTFGGGTKVEIK |
| 398 | ATX-P-572 | VL | DIVMTQSPDSLAVSLGERATINCKSSQSVLYSSNNKNYLAWYQQ |
| | | | KPGQPPKLLIYWASPRESGVPDRFSGSGSGTDFTLTISSLQAEDVA |
| | | | VYYCQQYYSIPRTFGQGTKVEIK |
| 399 | ATX-P-573 | VL | DIQMTQSPSSVSASVGDRVTITCRASQGISSWLAWYQQKPGKAPK. |
| | | | VLIYAASSLQSGVPSRFSGSGSGTDFTLTISSLQPEDFATYYCQQA |
| | | | NSFPPTFGPGTKVDIK |
| 400 | ATX-P-581 | VL | DIQMTQSPSSVSASVGDRVTITCRASQGVNNWLAWYQQKPGKAP |
| | | | KLLIHAASSLLSGVPSRFSGSGSGTDFTLTITSLQPEDFATYYCQQ |
| | | | ANSFPITFGQGTRLEIK |
| 401 | ATX-P-587 | VL | DIVMTQSPDSLAVSLGERATINCKSSQSVLYSSNNKNYLAWYQQ |
| | | | KPGQPPKLLIYWASTRESGVPDRFSGSGSGTDFTLTISSLQAEDVA |
| | | | VYYCQQYYSTPYTFGQGTKLEIK |
| 402 | ATX-P-592 | VL | DIVMTQSPDSLAVSLGERATINCKSSQSVLYSSNNKNYLAWYQQ |
| | | | KPGQPPKLLIYWASNRESGVPDRFSGSGSGTDFTLTISSLQAEDVA |
| | | | VYYCQQYYSTPYTFGQGTKLEIK |
| 403 | ATX-P-594 | VL | EIVLTQSPGTLSLSPGERATLSCRASQSVSSSYLAWYQQKPGQSPR |
| | | | LLIYGASSRATGIPDRFSGSGSGTDFTLTISRLEPEDFAVYYCQQY |
| | | | GRSVTFGGGTKLEIK |
| 404 | ATX-P-595 | VL | DIVMTQSPDSLAVSLGERATINCKSSQSVLYSSNNKNYLAWYQQ |
| | | | KPGQPPKLLIYWASTRESGVPDRFSGSGSGTDFTLTISSLQAEDVA |
| | | | VYYCQQYYSTPYTFGQGTKLEIK |
| 405 | ATX-P-604 | VL | EIVLTQSPDTLSLSPGERATLSCRASQTIRSSYLAWYQLKPGQAPR |
| | | | LLIYGASSRATGIPDRESGSGSGTDFTLSISRLEPEDFAVYYCQQY |
| | | | GRSIIFGGGTKVEIK |
| 406 | ATX-P-610 | VL | DIQMTQSPSSVSASVGDRVTITCRASQGISSWLAWYQQKPGKAPK |
| | | | LLIYAASSLQSGVPSRFSGSGSGTDFTLTISSLQPEDFATYYCQQN |
| | | | YRTPITFGQGTRLEIK |
| 407 | ATX-P-581 | VL - nucleotide | GACATCCAGATGACCCAGTCTCCATCTTCCGTGTCTACATCTGT |
| | | | TGGAGACAGAGTCACCATCACTTGTCGGGCGAGTCAGGGTATT |
| | | | AGCAGCTGGTTAGCCTGGTATCAGCAGAAACCAGGGAAAGCC |
| | | | CCTAAGCTCCTGATCTCTGCTGCATCCAGTTTGCAAAGTGGGG |
| | | | TCCCATCAAGGTTCAGCGGCAGTGGATCTGGGACAGATTTCAC |
| | | | TCTCACCATCAGCACCCTGCAGCCTGAAGACTTTGCATCTTAC |
| | | | TATTGTCAACAGGCTAACAGTTTCCCTCCGACGTTQGGCCAAG |
| | | | GGACCAGGGTGGAAATCAAA |
| 408 | ATX-P-561 | VL - nucleotide | GACATCCAGATGACCCAGTCTCCATCTTCCCTGTCTGCATCTGT |
| | | | CGGAGACAGAGTCACCATCACTTGTCGGGCGAGTCAGGGTATT |
| | | | AGCAGCTGGTTAACCTGGTATCAGCAGAAACCAGGGAAAGCC |
| | | | CCTAAGCTCCTGATCTATGCTGCATCCAGTTTGCAAGGTGGGG |
| | | | TCCCATCAAGATTCAGCGGCAGTGGATCTGGGACAGATTTCAC |
| | | | TCTCACCATCAGCAGCCTGCAGCCTGAAGATTTTGCAACTTAC |
| | | | TATTGTCAACAGGCTAACAGTTTCCCTCCGACGTTQGGCCAAG |
| | | | GGACCAAGGTGGAAATCAAA |
| 409 | ATX-P-573 | VL - nucleotide | GACATCCAGATGACCCAGTCTCCATCTTCCGTGTCTGCATCTAT |
| | | | AGGAGACAGAGTCACCATCACTTGTCGGGCGAGTAAGGGAAT |
| | | | TAGCATCTGGTTAGCCTGGTATCAGCAGAAACCAGGGAAAGC |
| | | | CCCTAAGGTCCTGATCTCTGCTGCATCCAGTTTGCAAAGTGGG |
| | | | GCCCCATCAAGGTTCAGCGGCAGTGGATCTGGGACAGATTTCA |
| | | | CTCTCACCATCAGCAGCCTGCAGCCTGAAGATTTTGCAACTTA |
| | | | CTATTGTCAACAGGCTAACAGTTTCCCTCCGACGTTCGGCCAA |
| | | | GGGACCAAGGTGGAGATCAAA |
| 410 | ATX-P-610 | VL - nucleotide | GAAATTGTGTTGACGCAGTCTCCAGGCACCCTGTCTTTGTCTCC |
| | | | AGGGGACAGAGCCACCCTCTCATGCAGGGCCAGTCAGAGTGT |
| | | | TAGGAACAGTTACGTAGCCTGGTACCAGCAGAAACCTGGCCA |
| | | | GGCTCCCAGGCTCCTCATCTATGGTGCATCCAGCAGGGCCACT |
| | | | GGCATCCCAGACAGGTTCAGTGGCAGTGGGTCTGGGACAGAC |
| | | | TTCAGTCTCACCATCGGCAGACTGGAGCCTGAGGATTTTGTAG |
| | | | TGTATTATTGTCAGCAATACGGTAACTCACCTCTCACTTTCGGC |
| | | | GGAGGGACCAAGGTGGAGATCAAA |
| 411 | ATX-P-560 | VL - nucleotide | GACATCGTGATGACCCAGTCTCCAGACTCCCTGGCTGTGTCTC |
| | | | TGGGCGAGAGGGCCACCATCAACTGCAAGTCCAGCCAGAGTG |
| | | | TTTTATACAGCTCCAACAATAAGAACTACTTAGCTTGGTACCA |
| | | | GCAGAAACCTGGACAGCCTCCTAAGCTGCTCATTTACTGGGCA |
| | | | TCTCCCCGGGAATCCGGGGTCCCTGACCGGTTCAGTGGCAGCG |
| | | | GGTCTGGGACAGATTTCACTCTCACCATCAGCAGCCTGCAGGC |
| | | | TGAAGATGTGGCAGTTTATTATTGTCAGCAATATTATAGTATT |
| | | | CCTCGGACGTTCGGCCAAGGGACCAAGGTGGAAATCAAA |
| 412 | ATX-P-562 | VL - nucleotide | GACATCCAGATGACCCAGTCTCCATCTTCCGTGTCTGCATCTGT |
| | | | AGGAGACAGAGTCACCATCACTTGTCGGGCGAGTCAGGGTAT |
| | | | TAGCAGCTGGTTAGCCTGGTATCAGCAGAAACCAGGGAAAGC |
| | | | CCCTAAGGTCCTGATCTATGCTGCATCCAGTTTGCAAAGTGGG |
| | | | GTCCCATCAAGGTTCAGCGGCAGTGGATCTGGGACAGATTTCA |
| | | | CTCTCACCATCAGCAGCCTGCAGCCTGAAGATTTTGCAACTTA |
| | | | CTATTGTCAACAGGCTAACAGTTTCCCTCCCACTTTCGGCCCTG |
| | | | GGACCAAAGTGGATATCAAA |
| 413 | ATX-P-566 | VL - nucleotide | GACATCCAGATGACTCAGTCTCCATCTTCCGTGTCTGCATCTGT |
| | | | AGGAGACAGAGTCACCATCACTTGTCGGGCGAGTCAGGGTGT |
| | | | TAACAACTGGTTAGCCTGGTATCAGCAGAAACCAGGGAAAGC |
| | | | CCCTAAGCTCCTGATCCATGCTGCATCCAGTTTGCTAAGTGGG |
| | | | GTCCCATCAAGGTTCAGCGGCAGTGGATCTGGGACAGATTTCA |
| | | | CGCTCACCATCACCAGCCTGCAGCCTGAAGATTTTGCAACTTA |
| | | | CTATTGTCAACAGGCTAACAGTTTCCCCATCACCTTCGGCCAA |
| | | | GGGACACGACTGGAAATTAAA |
| 414 | ATX-P-604 | VL - nucleotide | GACATCGTGATGACCCAGTCTCCAGACTCCCTGGCTGTGTCTC |
| | | | TGGGCGAGAGGGCCACCATCAACTGCAAGTCCAGCCAGAGTG |
| | | | TTTTATACAGCTCCAACAATAAGAACTACTTAGCTTGGTACCA |
| | | | GCAGAAACCAGGACAGCCTCCTAAGCTGCTCATTTACTGGGCA |
| | | | TCTACCCGGGAATCCGGGGTCCCTGACCGATTCAGTGGCAGCG |
| | | | GGTCTGGGACAGATTTCACTCTCACCATCAGCAGCCTGCAGGC |
| | | | TGAAGATGTGGCAGTTTATTACTGTCAGCAATATTATAGTACT |
| | | | CCGTACACTTTTGGCCAGGGGACCAAGCTGGAGATCAAA |
| 415 | ATX-P-594 | VL - nucleotide | GACATCGTGATGACCCAGTCTCCAGACTCCCTGGCTGTGTCTC |
| | | | TGGGCGAGAGGGCCACCATCAACTGCAAGTCCAGCCAGAGTG |
| | | | TTTTATACAGCTCCAACAATAAGAACTACTTAGCTTGGTACCA |
| | | | GCAGAAACCAGGACAGCCTCCTAAGCTGCTCATTTACTGGGCA |
| | | | TCTAACCGGGAATCCGGGGTCCCTGACCGATTCAGTGGCTCCG |
| | | | GGTCTGGGACAGATTTCACTCTCACCATCAGCAGCCTGCAGGC |
| | | | TGAAGATGTGGCAGTTTATTACTGTCAGCAATATTATAGTACT |
| | | | CCGTACACTTTTGGCCAGGGGACCAAGCTGGAGATCAAA |
| 416 | ATX-P-572 | VL - nucleotide | GAAATTGTGTTGACGCAGTCTCCAGGCACCCTGTCTTTGTCTCC |
| | | | AGGGGAGAGAGCCACCCTCTCCTGCAGGGCCAGTCAGAGTGT |
| | | | TAGCAGCAGCTACTTAGCCTGGTACCAGCAGAAACCTGGCCA |
| | | | GTCTCCCAGGCTCCTCATCTATGGTGCATCCAGCAGGGCCACT |
| | | | GGCATCCCAGACAGGTTCAGTGGCAGTGGGTCTGGGACAGAC |
| | | | TTCACTCTCACCATCAGCAGACTGGAGCCTGAGGATTTTGCAG |
| | | | TATATTACTGTCAGCAGTATGGTAGGTCAGTCACTTTCGGCGG |
| | | | AGGGACCAAGCTGGAAATCAAA |
| 417 | ATX-P-587 | VL - nucleotide | GACATCGTGATGACCCAGTCTCCAGACTCCCTGGCTGTGTCTC |
| | | | TGGGCGAGAGGGCCACCATCAACTGCAAGTCCAGCCAGAGTG |
| | | | TTTTATACAGCTCCAACAATAAGAACTACTTAGCTTGGTACCA |
| | | | GCAGAAACCAGGACAGCCTCCTAAGCTGCTCATTTACTGGGCA |
| | | | TCTACCCGGGAATCCGGGGTCCCTGACCGATTCAGTGGCAGCG |
| | | | GGTCTGGGACAGATTTCACTCTCACCATCAGCAGCCTGCAGGC |
| | | | TGAAGATGTGGCAGTTTATTACTGTCAGCAATATTATAGTACT |
| | | | CCGTACACTTTTGGCCAGGGGACCAAGCTGGAAATCAAA |
| 418 | ATX-P-592 | VL - nucleotide | GAAATAGTGCTGACTCAGTCTCCAGACACCCTATCTTTGTCTC |
| | | | CAGGGGAAAGAGCCACCCTCTCCTGCAGGGCCAGTCAGACTA |
| | | | TTAGGAGCAGCTACTTAGCCTGGTACCAGCTGAAACCTGGCCA |
| | | | GGCTCCCAGGCTCCTCATCTATGGTGCATCCAGCAGGGCCACT |
| | | | GGCATCCCAGACAGGTTCAGTGGCAGTGGGTCTGGGACAGAC |
| | | | TTCACTCTCTCCATCAGCAGACTGGAGCCTGAAGATTTTGCAG |
| | | | TGTATTACTGTCAACAGTATGGCCGCTCAATCATTTTCGGCGG |
| | | | AGGGACCAAAGTGGAAATCAAA |
| 419 | ATX-P-595 | VL - nucleotide | GACATCCAGATGACCCAGTCTCCATCTTCCGTGTCTGCATCTGT |
| | | | AGGAGACAGAGTCACCATCACTTGTCGGGCGAGTCAGGGTAT |
| | | | TAGCAGCTGGTTAGCCTGGTATCAGCAGAAACCAGGGAAAGC |
| | | | CCCTAAGCTCCTGATCTATGCTGCATCCAGTTTGCAAAGTGGG |
| | | | GTCCCATCAAGGTTCAGCGGCAGTGGATCTGGGACAGATTTCA |
| | | | CTCTCACCATCAGCAGCCTGCAGCCTGAAGATTTTGCAACTTA |
| | | | CTACTGTCAACAGAATTACAGAACCCCGATCACCTTCGGCCAA |
| | | | GGGACACGACTGGAGATTAAA |

TABLE 5
Anti-CFHR4 antibodies (HC IgG1 Fc and LC Kappa sequences)

| SEQ ID | Antibody | | |
|---|---|---|---|
| NO: | Name: | Descriptor: | Sequence: |
| 420 | ATX-P-583 | HC IgG1 Fc | QVQLVQSGAEVKKPGASVKVSCKASGYTFTTYGISWVRQAPGQGLE |
| | | | WMGWISAYSGNTHYAQSLQDRVTMTTDTSTSTAYMEVRSLRSDDTA |
| | | | VYYCAKDEGYCSSTGCLNLFDPWGQGTLVTVSSASTKGPSVFPLAPS |
| | | | SKSTSGGTAALGCLVKDYFPEPVTVSWNSGALTSGVHTFPAVLQSSG |
| | | | LYSLSSVVTVPSSSLGTQTYICNVNHKPSNTKVDKRVEPKSCDKTHTC |
| | | | PPCPAPELLGGPSVFLFPPKPKDTLMISRTPEVTCVVVDVSHEDPEVKF |
| | | | NWYVDGVEVHNAKTKPREEQYASTYRVVSVLTVLHQDWLNGKEYK |
| | | | CKVSNKALPAPIEKTISKAKGQPREPQVYTLPPSREEMTKNQVSLTCL |
| | | | VKGFYPSDIAVEWESNGQPENNYKTTPPVLDSDGSFFLYSKLTVDKSR |
| | | | WQQGNVFSCSVMHEALHNHYTQKSLSLSPG |
| 421 | ATX-P-591 | HC IgG1 Fc | QVQLVQSGAEVKKPGASVKVSCKASGYTFTSYGISWVRQAPGQGLE |
| | | | WMGWISAYNGNTNYAQKLQGRVTMTTDTSTSTAYMELRSLRSDDT |
| | | | AIYYCTRDLRGTAFDYWGQGTPVTVSSASTKGPSVFPLAPSSKSTSGG |
| | | | TAALGCLVKDYFPEPVTVSWNSGALTSGVHTFPAVLQSSGLYSLSSV |
| | | | VTVPSSSLGTQTYICNVNHKPSNTKVDKRVEPKSCDKTHTCPPCPAPE |
| | | | LLGGPSVFLFPPKPKDTLMISRTPEVTCVVVDVSHEDPEVKFNWYVD |
| | | | GVEVHNAKTKPREEQYASTYRVVSVLTVLHQDWLNGKEYKCKVSN |
| | | | KALPAPIEKTISKAKGQPREPQVYTLPPSREEMTKNQVSLTCLVKGFY |
| | | | PSDIAVEWESNGQPENNYKTTPPVLDSDGSFFLYSKLTVDKSRWQQG |
| | | | NVFSCSVMHEALHNHYTQKSLSLSPG |
| 422 | ATX-P-602 | HC IgG1 Fc | QVQLVQSGAEVKKPGASVKVSCKASGYTFTGYYMHWVRQAPGQGL |
| | | | EWMGWINPNSGGTNYAKKFQGRVTMTRDTSISTAYMELSRLRSDDT |
| | | | AVYYCARGDTIFRLVTPLDYWGQGTLVTVSSASTKGPSVFPLAPSSKS |
| | | | TSGGTAALGCLVKDYFPEPVTVSWNSGALTSGVHTFPAVLQSSGLYS |
| | | | LSSVVTVPSSSLGTQTYICNVNHKPSNTKVDKRVEPKSCDKTHTCPPC |
| | | | PAPELLGGPSVFLFPPKPKDTLMISRTPEVTCVVVDVSHEDPEVKFNW |
| | | | YVDGVEVHNAKTKPREEQYASTYRVVSVLTVLHQDWLNGKEYKCK |
| | | | VSNKALPAPIEKTISKAKGQPREPQVYTLPPSREEMTKNQVSLTCLVK |
| | | | GFYPSDIAVEWESNGQPENNYKTTPPVLDSDGSFFLYSKLTVDKSRW |
| | | | QQGNVFSCSVMHEALHNHYTQKSLSLSPG |
| 423 | ATX-P-597 | HC IgG1 Fc | QVQLVQSGAEVKKPGASVKVSCKASGYTFTNYYMQWVRQAPGQGL |
| | | | EWLGIIDPSGGSTTYAQKFQGRVTMTRDTSTSTVHMELRSLRSEDTA |
| | | | VYYCARDEGTDRPGWGYWGQGTLVTVSSASTKGPSVFPLAPSSKSTS |
| | | | GGTAALGCLVKDYFPEPVTVSWNSGALTSGVHTFPAVLQSSGLYSLS |
| | | | SVVTVPSSSLGTQTYICNVNHKPSNTKVDKRVEPKSCDKTHTCPPCPA |
| | | | PELLGGPSVFLFPPKPKDTLMISRTPEVTCVVVDVSHEDPEVKFNWYV |
| | | | DGVEVHNAKTKPREEQYASTYRVVSVLTVLHQDWLNGKEYKCKVS |
| | | | NKALPAPIEKTISKAKGQPREPQVYTLPPSREEMTKNQVSLTCLVKGF |
| | | | YPSDIAVEWESNGQPENNYKTTPPVLDSDGSFFLYSKLTVDKSRWQQ |
| | | | GNVFSCSVMHEALHNHYTQKSLSLSPG |
| 424 | ATX-P-601 | HC IgG1 Fc | QVQLVQSGAEVKKPGASVKVSCKASGYTFTSYYMHWVRQAPGQGL |
| | | | EWMGIINPSGGSTNYAQKFQGRLTMTRDTSTNTVYMELSSLRSEDTA |
| | | | VYYCATDQSGGMDVWGKGTTVTVSSASTKGPSVFPLAPSSKSTSGGT |
| | | | AALGCLVKDYFPEPVTVSWNSGALTSGVHTFPAVLQSSGLYSLSSVV |
| | | | TVPSSSLGTQTYICNVNHKPSNTKVDKRVEPKSCDKTHTCPPCPAPEL |
| | | | LGGPSVFLFPPKPKDTLMISRTPEVTCVVVDVSHEDPEVKFNWYVDG |
| | | | VEVHNAKTKPREEQYASTYRVVSVLTVLHQDWLNGKEYKCKVSNK |
| | | | ALPAPIEKTISKAKGQPREPQVYTLPPSREEMTKNQVSLTCLVKGFYPS |
| | | | DIAVEWESNGQPENNYKTTPPVLDSDGSFFLYSKLTVDKSRWQQGNV |
| | | | FSCSVMHEALHNHYTQKSLSLSPG |
| 425 | ATX-P-607 | HC IgG1 Fc | QVQLVQSGAEVKKPGASVKVSCKASGYTFTSYYMHWVRQAPGQGL |
| | | | EWMGIINPSGGSTSYAQKFQGRVTMTRDTSTNTVYMELSSLRSEDTA |
| | | | VYYCARDPEYSSAFDIWGQGTMVTVSSASTKGPSVFPLAPSSKSTSGG |
| | | | TAALGCLVKDYFPEPVTVSWNSGALTSGVHTFPAVLQSSGLYSLSSV |
| | | | VTVPSSSLGTQTYICNVNHKPSNTKVDKRVEPKSCDKTHTCPPCPAPE |
| | | | LLGGPSVFLFPPKPKDTLMISRTPEVTCVVVDVSHEDPEVKFNWYVD |
| | | | GVEVHNAKTKPREEQYASTYRVVSVLTVLHQDWLNGKEYKCKVSN |
| | | | KALPAPIEKTISKAKGQPREPQVYTLPPSREEMTKNQVSLTCLVKGFY |
| | | | PSDIAVEWESNGQPENNYKTTPPVLDSDGSFFLYSKLTVDKSRWQQG |
| | | | NVFSCSVMHEALHNHYTQKSLSLSPG |
| 426 | ATX-P-583 | HC IgG1 Fc- | CAGGTTCAGCTGGTGCAGTCTGGAGCTGAGGTGAAGAAGCCTGGG |
| | | nucleotide | GCCTCAGTGAAGGTCTCCTGCAAGGCTTCTGGTTACACCTTTACCA |
| | | | CCTATGGTATCAGCTGGGTGCGACAGGCCCCTGGACAAGGGCTTG |
| | | | AGTGGATGGGATGGATCAGCGCTTACAGTGGTAACACACACTATG |
| | | | CACAGAGCCTCCAGGACAGAGTCACCATGACCACAGACACATCCA |
| | | | CGAGTACAGCCTACATGGAGGTGAGGAGCCTGAGATCTGACGACA |
| | | | CGGCCGTGTATTACTGTGCGAAAGATGAGGGATATTGTAGTAGTA |
| | | | CCGGCTGCTTAAACTTGTTCGACCCCTGGGGCCAGGGAACCCTGGT |
| | | | CACCGTCTCCTCAGCTAGCACTAAAGGGCCTTCTGTATTTCCCTTG |
| | | | GCCCCGTCCAGCAAATCGACCTCGGGAGGGACAGCCGCCCTGGGT |
| | | | TGCCTTGTGAAAGATTATTTCCCTGAGCCAGTTACCGTAAGTTGGA |
| | | | ACAGTGGGGCGCTGACAAGTGGTGTGCACACGTTTCCTGCCGTCCT |
| | | | GCAATCATCGGGCTTGTATAGCCTCAGCTCTGTGGTCACTGTCCCA |
| | | | AGTTCATCGCTGGGCACTCAGACGTATATTTGCAATGTGAACCACA |
| | | | AACCTTCAAATACAAAAGTGGATAAACGCGTAGAACCGAAATCGT |
| | | | GTGATAAAACTCACACATGCCCGCCATGCCCGGCACCTGAACTGC |
| | | | TTGGTGGTCCCAGCGTGTTCCTGTTCCCGCCGAAGCCTAAAGATAC |
| | | | TCTAATGATCAGCCGTACGCCAGAGGTGACATGTGTCGTGGTTGA |
| | | | CGTGTCCCACGAAGATCCCGAAGTTAAGTTCAATTGGTATGTTGAT |
| | | | GGTGTAGAGGTACACAATGCTAAGACTAAACCTCGCGAGGAGCAG |
| | | | TACGCCTCGACCTATCGTGTCGTGAGCGTTCTGACCGTCCTTCACC |
| | | | AAGATTGGCTTAACGGCAAAGAATATAAGTGCAAGGTAAGCAATA |
| | | | AAGCACTTCCGGCCCCAATCGAGAAAACCATTTCCAAGGCCAAAG |
| | | | GTCAACCAAGAGAACCCCAGGTGTATACTCTTCCGCCTTCTCGTGA |
| | | | GGAAATGACTAAAAATCAAGTATCCCTTACGTGTCTGGTTAAAGG |
| | | | TTTTTATCCTAGCGATATTGCTGTTGAATGGGAATCGAACGGTCAG |
| | | | CCGGAGAATAATTATAAAACAACGCCACCCGTCCTGGATAGCGAC |
| | | | GGCTCATTTTTTCTGTATAGCAAACTGACTGTAGATAAATCACGGT |
| | | | GGCAGCAGGGCAATGTATTCAGTTGCTCCGTTATGCATGAAGCGTT |
| | | | ACATAATCACTACACGCAGAAATCTCTTAGTCTTTCACCCGGT |
| 427 | ATX-P-591 | HC IgG1 Fc- | CAGGTTCAGCTGGTGCAGTCTGGAGCTGAGGTGAAGAAGCCTGGG |
| | | nucleotide | GCCTCAGTGAAGGTCTCCTGCAAGGCTTCTGGTTACACCTTTACCA |
| | | | GCTATGGTATCAGCTGGGTGCGACAGGCCCCTGGACAAGGGCTTG |
| | | | AGTGGATGGGATGGATCAGCGCTTACAATGGTAACACAAACTATG |
| | | | CACAGAAGCTCCAGGGCAGAGTCACCATGACCACAGACACATCCA |
| | | | CGAGCACAGCCTACATGGAGCTGAGGAGCCTGAGATCTGACGACA |
| | | | CTGCCATTTATTACTGTACGAGAGATCTACGTGGAACTGCCTTTGA |
| | | | CTACTGGGGCCAGGGAACCCCGGTCACTGTCTCCTCAGCTAGCACT |
| | | | AAAGGGCCTTCTGTATTTCCCTTGGCCCCGTCCAGCAAATCGACCT |
| | | | CGGGAGGGACAGCCGCCCTGGGTTGCCTTGTGAAAGATTATTTCC |
| | | | CTGAGCCAGTTACCGTAAGTTGGAACAGTGGGGCGCTGACAAGTG |
| | | | GTGTGCACACGTTTCCTGCCGTCCTGCAATCATCGGGCTTGTATAG |
| | | | CCTCAGCTCTGTGGTCACTGTCCCAAGTTCATCGCTGGGCACTCAG |
| | | | ACGTATATTTGCAATGTGAACCACAAACCTTCAAATACAAAAGTG |
| | | | GATAAACGCGTAGAACCGAAATCGTGTGATAAAACTCACACATGC |
| | | | CCGCCATGCCCGGCACCTGAACTGCTTGGTGGTCCCAGCGTGTTCC |
| | | | TGTTCCCGCCGAAGCCTAAAGATACTCTAATGATCAGCCGTACGCC |
| | | | AGAGGTGACATGTGTCGTGGTTGACGTGTCCCACGAAGATCCCGA |
| | | | AGTTAAGTTCAATTGGTATGTTGATGGTGTAGAGGTACACAATGCT |
| | | | AAGACTAAACCTCGCGAGGAGCAGTACGCCTCGACCTATCGTGTC |
| | | | GTGAGCGTTCTGACCGTCCTTCACCAAGATTGGCTTAACGGCAAA |
| | | | GAATATAAGTGCAAGGTAAGCAATAAAGCACTTCCGGCCCCAATC |
| | | | GAGAAAACCATTTCCAAGGCCAAAGGTCAACCAAGAGAACCCCA |
| | | | GGTGTATACTCTTCCGCCTTCTCGTGAGGAAATGACTAAAAATCAA |
| | | | GTATCCCTTACGTGTCTGGTTAAAGGTTTTTATCCTAGCGATATTG |
| | | | CTGTTGAATGGGAATCGAACGGTCAGCCGGAGAATAATTATAAAA |
| | | | CAACGCCACCCGTCCTGGATAGCGACGGCTCATTTTTTCTGTATAG |
| | | | CAAACTGACTGTAGATAAATCACGGTGGCAGCAGGGCAATGTATT |
| | | | CAGTTGCTCCGTTATGCATGAAGCGTTACATAATCACTACACGCAG |
| | | | AAATCTCTTAGTCTTTCACCCGGT |
| 428 | ATX-P-602 | HC IgG1 Fc- | CAGGTGCAGCTGGTGCAATCTGGGGCTGAGGTGAAGAAGCCTGGG |
| | | nucleotide | GCCTCAGTGAAGGTCTCCTGCAAGGCTTCTGGATACACCTTCACCG |
| | | | GCTACTATATGCACTGGGTGCGACAGGCCCCTGGACAAGGACTTG |
| | | | AGTGGATGGGATGGATCAACCCTAACAGTGGTGGCACAAACTATG |
| | | | CAAAGAAGTTTCAGGGCAGGGTCACCATGACCAGGGACACGTCCA |
| | | | TCAGCACAGCCTACATGGAGTTGAGCAGGCTGAGATCTGACGACA |
| | | | CGGCCGTGTATTACTGTGCGAGAGGGGATACGATTTTTCGACTGGT |
| | | | TACCCCTCTTGACTACTGGGGCCAGGGAACCCTGGTCACCGTCTCC |
| | | | TCAGCTAGCACTAAAGGGCCTTCTGTATTTCCCTTGGCCCCGTCCA |
| | | | GCAAATCGACCTCGGGAGGGACAGCCGCCCTGGGTTGCCTTGTGA |
| | | | AAGATTATTTCCCTGAGCCAGTTACCGTAAGTTGGAACAGTGGGG |
| | | | CGCTGACAAGTGGTGTGCACACGTTTCCTGCCGTCCTGCAATCATC |
| | | | GGGCTTGTATAGCCTCAGCTCTGTGGTCACTGTCCCAAGTTCATCG |
| | | | CTGGGCACTCAGACGTATATTTGCAATGTGAACCACAAACCTTCA |
| | | | AATACAAAAGTGGATAAACGCGTAGAACCGAAATCGTGTGATAAA |
| | | | ACTCACACATGCCCGCCATGCCCGGCACCTGAACTGCTTGGTGGTC |
| | | | CCAGCGTGTTCCTGTTCCCGCCGAAGCCTAAAGATACTCTAATGAT |
| | | | CAGCCGTACGCCAGAGGTGACATGTGTCGTGGTTGACGTGTCCCA |
| | | | CGAAGATCCCGAAGTTAAGTTCAATTGGTATGTTGATGGTGTAGA |
| | | | GGTACACAATGCTAAGACTAAACCTCGCGAGGAGCAGTACGCCTC |
| | | | GACCTATCGTGTCGTGAGCGTTCTGACCGTCCTTCACCAAGATTGG |
| | | | CTTAACGGCAAAGAATATAAGTGCAAGGTAAGCAATAAAGCACTT |
| | | | CCGGCCCCAATCGAGAAAACCATTTCCAAGGCCAAAGGTCAACCA |
| | | | AGAGAACCCCAGGTGTATACTCTTCCGCCTTCTCGTGAGGAAATG |
| | | | ACTAAAAATCAAGTATCCCTTACGTGTCTGGTTAAAGGTTTTTATC |
| | | | CTAGCGATATTGCTGTTGAATGGGAATCGAACGGTCAGCCGGAGA |
| | | | ATAATTATAAAACAACGCCACCCGTCCTGGATAGCGACGGCTCAT |
| | | | TTTTTCTGTATAGCAAACTGACTGTAGATAAATCACGGTGGCAGCA |
| | | | GGGCAATGTATTCAGTTGCTCCGTTATGCATGAAGCGTTACATAAT |
| | | | CACTACACGCAGAAATCTCTTAGTCTTTCACCCGGT |
| 429 | ATX-P-597 | HC IgG1 Fc- | CAGGTGCAGCTGGTGCAATCTGGAGCTGAGGTGAAGAAGCCTGGG |
| | | nucleotide | GCCTCAGTGAAGGTTTCCTGCAAGGCATCTGGATACACCTTCACCA |
| | | | ACTACTATATGCAGTGGGTGCGACAGGCCCCTGGACAAGGGCTTG |
| | | | AGTGGCTGGGAATAATCGACCCTAGTGGTGGTAGCACAACCTATG |
| | | | CACAGAAGTTCCAGGGCAGAGTCACCATGACCAGGGACACGTCCA |
| | | | CGAGCACAGTCCACATGGAGCTGAGAAGTCTGAGATCTGAGGACA |
| | | | CGGCCGTCTATTATTGCGCGAGAGATGAGGGAACAGATCGTCCCG |
| | | | GGTGGGGCTACTGGGGCCAGGGAACCCTGGTCACTGTCTCCTCAG |
| | | | CTAGCACTAAAGGGCCTTCTGTATTTCCCTTGGCCCCGTCCAGCAA |
| | | | ATCGACCTCGGGAGGGACAGCCGCCCTGGGTTGCCTTGTGAAAGA |
| | | | TTATTTCCCTGAGCCAGTTACCGTAAGTTGGAACAGTGGGGCGCTG |
| | | | ACAAGTGGTGTGCACACGTTTCCTGCCGTCCTGCAATCATCGGGCT |
| | | | TGTATAGCCTCAGCTCTGTGGTCACTGTCCCAAGTTCATCGCTGGG |
| | | | CACTCAGACGTATATTTGCAATGTGAACCACAAACCTTCAAATAC |
| | | | AAAAGTGGATAAACGCGTAGAACCGAAATCGTGTGATAAAACTCA |
| | | | CACATGCCCGCCATGCCCGGCACCTGAACTGCTTGGTGGTCCCAGC |
| | | | GTGTTCCTGTTCCCGCCGAAGCCTAAAGATACTCTAATGATCAGCC |
| | | | GTACGCCAGAGGTGACATGTGTCGTGGTTGACGTGTCCCACGAAG |
| | | | ATCCCGAAGTTAAGTTCAATTGGTATGTTGATGGTGTAGAGGTACA |
| | | | CAATGCTAAGACTAAACCTCGCGAGGAGCAGTACGCCTCGACCTA |
| | | | TCGTGTCGTGAGCGTTCTGACCGTCCTTCACCAAGATTGGCTTAAC |
| | | | GGCAAAGAATATAAGTGCAAGGTAAGCAATAAAGCACTTCCGGCC |
| | | | CCAATCGAGAAAACCATTTCCAAGGCCAAAGGTCAACCAAGAGAA |
| | | | CCCCAGGTGTATACTCTTCCGCCTTCTCGTGAGGAAATGACTAAAA |
| | | | ATCAAGTATCCCTTACGTGTCTGGTTAAAGGTTTTTATCCTAGCGA |
| | | | TATTGCTGTTGAATGGGAATCGAACGGTCAGCCGGAGAATAATTA |
| | | | TAAAACAACGCCACCCGTCCTGGATAGCGACGGCTCATTTTTTCTG |
| | | | TATAGCAAACTGACTGTAGATAAATCACGGTGGCAGCAGGGCAAT |
| | | | GTATTCAGTTGCTCCGTTATGCATGAAGCGTTACATAATCACTACA |
| | | | CGCAGAAATCTCTTAGTCTTTCACCCGGT |
| 430 | ATX-P-601 | HC IgG1 Fc- | CAGGTGCAGCTGGTGCAATCTGGGGCTGAGGTGAAGAAGCCTGGG |
| | | nucleotide | GCCTCAGTGAAGGTTTCCTGCAAGGCATCTGGATACACCTTCACCA |
| | | | GCTACTATATGCACTGGGTGCGACAGGCCCCTGGACAAGGGCTTG |
| | | | AGTGGATGGGAATAATCAACCCTAGTGGTGGTAGCACAAACTACG |
| | | | CACAGAAGTTCCAGGGCAGACTCACCATGACCAGGGACACGTCCA |
| | | | CGAACACAGTCTACATGGAACTGAGTAGCCTGAGATCTGAGGACA |
| | | | CGGCCGTGTATTACTGTGCGACAGATCAAAGTGGGGGGATGGACG |
| | | | TCTGGGGCAAAGGGACCACGGTCACCGTCTCCTCAGCTAGCACTA |
| | | | AAGGGCCTTCTGTATTTCCCTTGGCCCCGTCCAGCAAATCGACCTC |
| | | | GGGAGGGACAGCCGCCCTGGGTTGCCTTGTGAAAGATTATTTCCCT |
| | | | GAGCCAGTTACCGTAAGTTGGAACAGTGGGGCGCTGACAAGTGGT |
| | | | GTGCACACGTTTCCTGCCGTCCTGCAATCATCGGGCTTGTATAGCC |
| | | | TCAGCTCTGTGGTCACTGTCCCAAGTTCATCGCTGGGCACTCAGAC |
| | | | GTATATTTGCAATGTGAACCACAAACCTTCAAATACAAAAGTGGA |
| | | | TAAACGCGTAGAACCGAAATCGTGTGATAAAACTCACACATGCCC |
| | | | GCCATGCCCGGCACCTGAACTGCTTGGTGGTCCCAGCGTGTTCCTG |
| | | | TTCCCGCCGAAGCCTAAAGATACTCTAATGATCAGCCGTACGCCA |
| | | | GAGGTGACATGTGTCGTGGTTGACGTGTCCCACGAAGATCCCGAA |
| | | | GTTAAGTTCAATTGGTATGTTGATGGTGTAGAGGTACACAATGCTA |
| | | | AGACTAAACCTCGCGAGGAGCAGTACGCCTCGACCTATCGTGTCG |
| | | | TGAGCGTTCTGACCGTCCTTCACCAAGATTGGCTTAACGGCAAAG |
| | | | AATATAAGTGCAAGGTAAGCAATAAAGCACTTCCGGCCCCAATCG |
| | | | AGAAAACCATTTCCAAGGCCAAAGGTCAACCAAGAGAACCCCAG |
| | | | GTGTATACTCTTCCGCCTTCTCGTGAGGAAATGACTAAAAATCAAG |
| | | | TATCCCTTACGTGTCTGGTTAAAGGTTTTTATCCTAGCGATATTGCT |
| | | | GTTGAATGGGAATCGAACGGTCAGCCGGAGAATAATTATAAAACA |
| | | | ACGCCACCCGTCCTGGATAGCGACGGCTCATTTTTTCTGTATAGCA |
| | | | AACTGACTGTAGATAAATCACGGTGGCAGCAGGGCAATGTATTCA |
| | | | GTTGCTCCGTTATGCATGAAGCGTTACATAATCACTACACGCAGAA |
| | | | ATCTCTTAGTCTTTCACCCGGT |
| 431 | ATX-P-607 | HC IgG1 Fc- | CAGGTGCAGCTGGTGCAATCTGGGGCTGAGGTGAAGAAGCCTGGG |
| | | nucleotide | GCCTCAGTGAAGGTTTCCTGCAAGGCATCTGGATACACCTTCACCA |
| | | | GTTACTATATGCACTGGGTGCGACAGGCCCCTGGACAAGGGCTTG |
| | | | AGTGGATGGGAATAATCAACCCTAGTGGTGGTAGCACAAGCTACG |
| | | | CACAGAAGTTCCAGGGCAGAGTCACCATGACCAGGGACACGTCAA |
| | | | CGAACACAGTCTACATGGAGCTGAGCAGCCTTCGATCTGAGGACA |
| | | | CGGCCGTGTATTACTGTGCGAGAGATCCCGAGTATAGCAGTGCTTT |
| | | | TGATATCTGGGGACAAGGGACAATGGTCACCGTCTCCTCAGCTAG |
| | | | CACTAAAGGGCCTTCTGTATTTCCCTTGGCCCCGTCCAGCAAATCG |
| | | | ACCTCGGGAGGGACAGCCGCCCTGGGTTGCCTTGTGAAAGATTAT |
| | | | TTCCCTGAGCCAGTTACCGTAAGTTGGAACAGTGGGGCGCTGACA |
| | | | AGTGGTGTGCACACGTTTCCTGCCGTCCTGCAATCATCGGGCTTGT |
| | | | ATAGCCTCAGCTCTGTGGTCACTGTCCCAAGTTCATCGCTGGGCAC |
| | | | TCAGACGTATATTTGCAATGTGAACCACAAACCTTCAAATACAAA |
| | | | AGTGGATAAACGCGTAGAACCGAAATCGTGTGATAAAACTCACAC |
| | | | ATGCCCGCCATGCCCGGCACCTGAACTGCTTGGTGGTCCCAGCGTG |
| | | | TTCCTGTTCCCGCCGAAGCCTAAAGATACTCTAATGATCAGCCGTA |
| | | | CGCCAGAGGTGACATGTGTCGTGGTTGACGTGTCCCACGAAGATC |
| | | | CCGAAGTTAAGTTCAATTGGTATGTTGATGGTGTAGAGGTACACA |
| | | | ATGCTAAGACTAAACCTCGCGAGGAGCAGTACGCCTCGACCTATC |
| | | | GTGTCGTGAGCGTTCTGACCGTCCTTCACCAAGATTGGCTTAACGG |
| | | | CAAAGAATATAAGTGCAAGGTAAGCAATAAAGCACTTCCGGCCCC |
| | | | AATCGAGAAAACCATTTCCAAGGCCAAAGGTCAACCAAGAGAACC |
| | | | CCAGGTGTATACTCTTCCGCCTTCTCGTGAGGAAATGACTAAAAAT |
| | | | CAAGTATCCCTTACGTGTCTGGTTAAAGGTTTTTATCCTAGCGATA |
| | | | TTGCTGTTGAATGGGAATCGAACGGTCAGCCGGAGAATAATTATA |
| | | | AAACAACGCCACCCGTCCTGGATAGCGACGGCTCATTTTTTCTGTA |
| | | | TAGCAAACTGACTGTAGATAAATCACGGTGGCAGCAGGGCAATGT |
| | | | ATTCAGTTGCTCCGTTATGCATGAAGCGTTACATAATCACTACACG |
| | | | CAGAAATCTCTTAGTCTTTCACCCGGT |
| 432 | ATX-P-583 | LC Kappa | DIQMTQSPSSLSASVGDRVTITCRASQNIGSYLNWYQQKPGNAPKLLI |
| | | | YATSTLQSGVPSRFSGSGSGTDFTLIISSLHPEDFTVYYCQQSFIIPFTFG |
| | | | PGTKVDIKRTVAAPSVFIFPPSDEQLKSGTASVVCLLNNFYPREAKVQ |
| | | | WKVDNALQSGNSQESVTEQDSKDSTYSLSSTLTLSKADYEKHKVYA |
| | | | CEVTHQGLSSPVTKSFNRGEC |
| 433 | ATX-P-591 | LC Kappa | DIQMTQSPSSLSASVGDRVTITCRASQSINTYLNWYQQKPGKAPKLLI |
| | | | YAASSLQSGVPSRFSGSGSGTDFTLTISSLQPEDFATYSCQHSFTTPFTF |
| | | | GPGTKLEIKRTVAAPSVFIFPPSDEQLKSGTASVVCLLNNFYPREAKV |
| | | | QWKVDNALQSGNSQESVTEQDSKDSTYSLSSTLTLSKADYEKHKVY |
| | | | ACEVTHQGLSSPVTKSFNRGEC |
| 434 | ATX-P-602 | LC Kappa | EIVLTQSPGTLSLSPGERATLSCRASQSVSSSYLAWYQQKPGQAPRLLI |
| | | | YGASSRATGIPDRFSGSGSGTQFTLTISSLQSEDFAVYYCQQYGSSPWT |
| | | | FGQGTKVDIKRTVAAPSVFIFPPSDEQLKSGTASVVCLLNNFYPREAK |
| | | | VQWKVDNALQSGNSQESVTEQDSKDSTYSLSSTLTLSKADYEKHKV |
| | | | YACEVTHQGLSSPVTKSFNRGEC |
| 435 | ATX-P-597 | LC Kappa | DIQMTQSPSSLSASIGDRVTITCRASQSISSYLDWYQRKSGKAPKLLIY |
| | | | AASSLQSGVPSRFSGSGSGTDFTLTISSLQPEDFATYYCQQSYSTPLTF |
| | | | GGGTKVDIKRTVAAPSVFIFPPSDEQLKSGTASVVCLLNNFYPREAKV |
| | | | QWKVDNALQSGNSQESVTEQDSKDSTYSLSSTLTLSKADYEKHKVY |
| | | | ACEVTHQGLSSPVTKSFNRGEC |
| 436 | ATX-P-601 | LC Kappa | DIQMTQSPSSLSASVGDRVTITCRASQSINIYLNWYQQKPEKDPKLLIY |
| | | | AASSLQSGVPSRFSGSGSGTDFTLTISNLQPEDFATYYCQQSYSTPITFG |
| | | | QGTRLEIKRTVAAPSVFIFPPSDEQLKSGTASVVCLLNNFYPREAKVQ |
| | | | WKVDNALQSGNSQESVTEQDSKDSTYSLSSTLTLSKADYEKHKVYA |
| | | | CEVTHQGLSSPVTKSFNRGEC |
| 437 | ATX-P-607 | LC Kappa | DIQMTQSPSSLSASVGDRGTITCRASQSIRSYLNWYQQKPGKAPKLLI |
| | | | YAASSLQSGVPSRFSGSGSGTDFTLTISSLQPEDFATYYCQQSYRTPVT |
| | | | FGPGTKVDIKRTVAAPSVFIFPPSDEQLKSGTASVVCLLNNFYPREAK |
| | | | VQWKVDNALQSGNSQESVTEQDSKDSTYSLSSTLTLSKADYEKHKV |
| | | | YACEVTHQGLSSPVTKSFNRGEC |
| 438 | ATX-P-583 | LC Kappa- | GACATCCAGATGACCCAGTCTCCGTCCTCCCTGTCTGCATCTGTAG |
| | | nucleotide | GAGACAGAGTCACCATCACTTGCCGGGCAAGTCAGAACATTGGCA |
| | | | GTTATTTAAATTGGTATCAGCAGAAACCAGGGAATGCCCCTAAAC |
| | | | TCCTGATCTATGCTACATCCACTTTGCAAAGTGGGGTCCCATCAAG |
| | | | GTTCAGTGGCAGTGGATCTGGGACAGATTTCACTCTCATCATCAGC |
| | | | AGTCTGCACCCTGAAGATTTTACAGTTTATTACTGTCAACAGAGTT |
| | | | TCATTATCCCATTCACTTTCGGCCCTGGGACCAAAGTGGATATCAA |
| | | | ACGTACGGTAGCTGCCCCTTCAGTTTTTATCTTTCCGCCGTCTGAC |
| | | | GAGCAGTTAAAATCCGGGACCGCTTCTGTAGTTTGCCTGCTGAATA |
| | | | ATTTTTATCCGCGTGAGGCTAAAGTACAATGGAAAGTCGACAATG |
| | | | CTTTGCAGTCGGGAAATTCACAGGAAAGTGTTACGGAGCAGGATT |
| | | | CTAAAGATTCCACATATTCACTCAGCTCCACCCTTACACTGAGCAA |
| | | | AGCCGACTATGAAAAACATAAAGTTTACGCATGTGAGGTGACGCA |
| | | | CCAAGGATTATCCAGTCCGGTCACAAAATCGTTTAACCGCGGTGA |
| | | | GTGT |
| 439 | ATX-P-591 | LC Kappa- | GACATCCAGATGACTCAGTCTCCATCCTCCCTGTCTGCATCTGTTG |
| | | nucleotide | GAGACAGAGTCACCATCACTTGCCGGGCAAGTCAGAGCATTAACA |
| | | | CCTATTTAAATTGGTATCAGCAGAAACCAGGGAAAGCCCCTAAGC |
| | | | TCCTGATCTATGCTGCATCCAGTTTGCAAAGTGGGGTCCCATCAAG |
| | | | GTTCAGTGGCAGTGGATCTGGGACAGATTTCACTCTCACCATCAGC |
| | | | AGTCTGCAACCTGAAGATTTTGCAACTTACTCCTGTCAACATAGTT |
| | | | TCACTACCCCATTCACTTTCGGCCCTGGGACCAAGCTGGAAATCAA |
| | | | ACGTACGGTAGCTGCCCCTTCAGTTTTTATCTTTCCGCCGTCTGAC |
| | | | GAGCAGTTAAAATCCGGGACCGCTTCTGTAGTTTGCCTGCTGAATA |
| | | | ATTTTTATCCGCGTGAGGCTAAAGTACAATGGAAAGTCGACAATG |
| | | | CTTTGCAGTCGGGAAATTCACAGGAAAGTGTTACGGAGCAGGATT |
| | | | CTAAAGATTCCACATATTCACTCAGCTCCACCCTTACACTGAGCAA |
| | | | AGCCGACTATGAAAAACATAAAGTTTACGCATGTGAGGTGACGCA |
| | | | CCAAGGATTATCCAGTCCGGTCACAAAATCGTTTAACCGCGGTGA |
| | | | GTGT |
| 440 | ATX-P-602 | LC Kappa- | GAAATTGTGTTGACGCAGTCTCCAGGCACCCTGTCTTTGTCTCCAG |
| | | nucleotide | GGGAAAGAGCCACCCTCTCCTGCAGGGCCAGTCAGAGTGTTAGCA |
| | | | GCAGCTACTTAGCCTGGTACCAGCAGAAACCTGGCCAGGCTCCCA |
| | | | GGCTCCTCATCTATGGTGCATCCAGTAGGGCCACTGGCATCCCAGA |
| | | | CAGGTTCAGTGGCAGTGGGTCTGGGACACAGTTCACTCTCACCATC |
| | | | AGCAGCCTGCAGTCTGAAGATTTTGCAGTTTATTACTGTCAGCAGT |
| | | | ATGGTAGCTCACCGTGGACGTTCGGCCAAGGGACCAAAGTGGATA |
| | | | TCAAACGTACGGTAGCTGCCCCTTCAGTTTTTATCTTTCCGCCGTCT |
| | | | GACGAGCAGTTAAAATCCGGGACCGCTTCTGTAGTTTGCCTGCTGA |
| | | | ATAATTTTTATCCGCGTGAGGCTAAAGTACAATGGAAAGTCGACA |
| | | | ATGCTTTGCAGTCGGGAAATTCACAGGAAAGTGTTACGGAGCAGG |
| | | | ATTCTAAAGATTCCACATATTCACTCAGCTCCACCCTTACACTGAG |
| | | | CAAAGCCGACTATGAAAAACATAAAGTTTACGCATGTGAGGTGAC |
| | | | GCACCAAGGATTATCCAGTCCGGTCACAAAATCGTTTAACCGCGG |
| | | | TGAGTGT |
| 441 | ATX-P-597 | LC Kappa- | GACATCCAGATGACCCAGTCTCCATCCTCCCTGTCTGCATCTATTG |
| | | nucleotide | GAGACAGAGTCACCATCACTTGCCGGGCAAGTCAGAGCATTAGCA |
| | | | GCTATTTAGATTGGTATCAGCGGAAATCAGGGAAAGCCCCTAAAC |
| | | | TCCTGATCTATGCTGCATCCAGTTTGCAAAGTGGGGTCCCATCAAG |
| | | | GTTCAGTGGCAGTGGATCTGGGACAGATTTCACTCTCACCATCAGC |
| | | | AGTCTGCAACCTGAAGATTTTGCAACTTACTACTGTCAACAGAGTT |
| | | | ACAGTACCCCGCTCACTTTCGGCGGAGGGACCAAAGTGGATATCA |
| | | | AACGTACGGTAGCTGCCCCTTCAGTTTTTATCTTTCCGCCGTCTGA |
| | | | CGAGCAGTTAAAATCCGGGACCGCTTCTGTAGTTTGCCTGCTGAAT |
| | | | AATTTTTATCCGCGTGAGGCTAAAGTACAATGGAAAGTCGACAAT |
| | | | GCTTTGCAGTCGGGAAATTCACAGGAAAGTGTTACGGAGCAGGAT |
| | | | TCTAAAGATTCCACATATTCACTCAGCTCCACCCTTACACTGAGCA |
| | | | AAGCCGACTATGAAAAACATAAAGTTTACGCATGTGAGGTGACGC |
| | | | ACCAAGGATTATCCAGTCCGGTCACAAAATCGTTTAACCGCGGTG |
| | | | AGTGT |
| 442 | ATX-P-601 | LC Kappa- | GACATCCAGATGACCCAGTCTCCATCCTCCCTGTCTGCATCTGTAG |
| | | nucleotide | GAGACAGAGTCACCATCACTTGCCGGGCAAGTCAGAGCATTAATA |
| | | | TCTATTTAAATTGGTATCAGCAGAAACCAGAGAAAGACCCTAAGC |
| | | | TCCTGATCTATGCTGCGTCCAGTTTGCAAAGTGGGGTCCCATCAAG |
| | | | GTTCAGTGGCAGTGGATCTGGGACAGATTTCACTCTCACCATCAGC |
| | | | AATCTGCAACCTGAAGATTTTGCAACTTACTACTGTCAACAGAGTT |
| | | | ACAGTACCCCGATCACCTTCGGCCAAGGGACACGACTGGAGATTA |
| | | | AACGTACGGTAGCTGCCCCTTCAGTTTTTATCTTTCCGCCGTCTGA |
| | | | CGAGCAGTTAAAATCCGGGACCGCTTCTGTAGTTTGCCTGCTGAAT |
| | | | AATTTTTATCCGCGTGAGGCTAAAGTACAATGGAAAGTCGACAAT |
| | | | GCTTTGCAGTCGGGAAATTCACAGGAAAGTGTTACGGAGCAGGAT |
| | | | TCTAAAGATTCCACATATTCACTCAGCTCCACCCTTACACTGAGCA |
| | | | AAGCCGACTATGAAAAACATAAAGTTTACGCATGTGAGGTGACGC |
| | | | ACCAAGGATTATCCAGTCCGGTCACAAAATCGTTTAACCGCGGTG |
| | | | AGTGT |
| 443 | ATX-P-607 | LC Kappa- | GACATCCAGATGACACAGTCTCCATCCTCCCTGTCTGCATCTGTAG |
| | | nucleotide | GAGACAGAGGCACCATCACTTGCCGGGCAAGTCAGAGCATTAGAA |
| | | | GTTATTTAAATTGGTATCAGCAGAAACCAGGGAAAGCCCCTAAAC |
| | | | TCCTGATCTATGCTGCATCCAGTTTGCAAAGTGGGGTCCCATCAAG |
| | | | GTTCAGTGGCAGTGGATCTGGGACAGATTTCACTCTCACCATCAGC |
| | | | AGTCTGCAACCTGAAGATTTTGCAACTTACTACTGTCAACAGAGTT |
| | | | ACAGAACCCCAGTCACTTTCGGCCCTGGGACCAAAGTGGATATCA |
| | | | AACGTACGGTAGCTGCCCCTTCAGTTTTTATCTTTCCGCCGTCTGA |
| | | | CGAGCAGTTAAAATCCGGGACCGCTTCTGTAGTTTGCCTGCTGAAT |
| | | | AATTTTTATCCGCGTGAGGCTAAAGTACAATGGAAAGTCGACAAT |
| | | | GCTTTGCAGTCGGGAAATTCACAGGAAAGTGTTACGGAGCAGGAT |
| | | | TCTAAAGATTCCACATATTCACTCAGCTCCACCCTTACACTGAGCA |
| | | | AAGCCGACTATGAAAAACATAAAGTTTACGCATGTGAGGTGACGC |
| | | | ACCAAGGATTATCCAGTCCGGTCACAAAATCGTTTAACCGCGGTG |
| | | | AGTGT |
| 444 | ATX-P-564 | HC IgG1 Fc | EVQLVESGGGLVKPGGSLRLSCAASGFTFSSYTMNWVRQAPGKGLE |
| | | | WVSSISSSSSYTYYADSVRGRFTISRDNAKNSLYLQMSSLRAEDTAVY |
| | | | YCARSASIAAGMDVWGKGTTVTVSSASTKGPSVFPLAPSSKSTSGGT |
| | | | AALGCLVKDYFPEPVTVSWNSGALTSGVHTFPAVLQSSGLYSLSSVV |
| | | | TVPSSSLGTQTYICNVNHKPSNTKVDKRVEPKSCDKTHTCPPCPAPEL |
| | | | LGGPSVFLFPPKPKDTLMISRTPEVTCVVVDVSHEDPEVKFNWYVDG |
| | | | VEVHNAKTKPREEQYASTYRVVSVLTVLHQDWLNGKEYKCKVSNK |
| | | | ALPAPIEKTISKAKGQPREPQVYTLPPSREEMTKNQVSLTCLVKGFYPS |
| | | | DIAVEWESNGQPENNYKTTPPVLDSDGSFFLYSKLTVDKSRWQQGNV |
| | | | FSCSVMHEALHNHYTQKSLSLSPG |
| 445 | ATX-P-568 | HC IgG1 Fc | EVQLVESGGGLVQPGGSLRLSCAASGFPFSSYVMSWVRQAPGKGLE |
| | | | WVSVISVSGGSTFYADSVRGRFTISRDNSKNTLYLQVYSLRAEDTAV |
| | | | YYCAKDGLAVAGFDHWGQGTLVTVSSASTKGPSVFPLAPSSKSTSGG |
| | | | TAALGCLVKDYFPEPVTVSWNSGALTSGVHTFPAVLQSSGLYSLSSV |
| | | | VTVPSSSLGTQTYICNVNHKPSNTKVDKRVEPKSCDKTHTCPPCPAPE |
| | | | LLGGPSVFLFPPKPKDTLMISRTPEVTCVVVDVSHEDPEVKFNWYVD |
| | | | GVEVHNAKTKPREEQYASTYRVVSVLTVLHQDWLNGKEYKCKVSN |
| | | | KALPAPIEKTISKAKGQPREPQVYTLPPSREEMTKNQVSLTCLVKGFY |
| | | | PSDIAVEWESNGQPENNYKTTPPVLDSDGSFFLYSKLTVDKSRWQQG |
| | | | NVFSCSVMHEALHNHYTQKSLSLSPG |
| 446 | ATX-P-574 | HC IgG1 Fc | EVQLVESGGGLVQRGGSLRLSCVASGFTFSSYAMSWVRQAPGKGLE |
| | | | WVSVISGSGGTTYYADSVKGRFTISRDDSKKTLYLQMNSLRAEDTAV |
| | | | YYCAKRGDYGDYMDVWGKGTTVTVSSASTKGPSVFPLAPSSKSTSG |
| | | | GTAALGCLVKDYFPEPVTVSWNSGALTSGVHTFPAVLQSSGLYSLSS |
| | | | VVTVPSSSLGTQTYICNVNHKPSNTKVDKRVEPKSCDKTHTCPPCPAP |
| | | | ELLGGPSVFLFPPKPKDTLMISRTPEVTCVVVDVSHEDPEVKFNWYV |
| | | | DGVEVHNAKTKPREEQYASTYRVVSVLTVLHQDWLNGKEYKCKVS |
| | | | NKALPAPIEKTISKAKGQPREPQVYTLPPSREEMTKNQVSLTCLVKGF |
| | | | YPSDIAVEWESNGQPENNYKTTPPVLDSDGSFFLYSKLTVDKSRWQQ |
| | | | GNVFSCSVMHEALHNHYTQKSLSLSPG |
| 447 | ATX-P-565 | HC IgG1 Fc | QVQLVESGGGVVQPGRSLRLSCAASGFTFNTYGIHWVRQAPGKGLE |
| | | | WVAVIWHDGSSKNYVDSVTGRFTISRDNSKNTVYLQMNSLRAEDTA |
| | | | VYYCARRGNWNYGFYYYYMDVWGKGTTVTVSSASTKGPSVFPLAP |
| | | | SSKSTSGGTAALGCLVKDYFPEPVTVSWNSGALTSGVHTFPAVLQSS |
| | | | GLYSLSSVVTVPSSSLGTQTYICNVNHKPSNTKVDKRVEPKSCDKTHT |
| | | | CPPCPAPELLGGPSVFLFPPKPKDTLMISRTPEVTCVVVDVSHEDPEVK |
| | | | FNWYVDGVEVHNAKTKPREEQYASTYRVVSVLTVLHQDWLNGKEY |
| | | | KCKVSNKALPAPIEKTISKAKGQPREPQVYTLPPSREEMTKNQVSLTC |
| | | | LVKGFYPSDIAVEWESNGQPENNYKTTPPVLDSDGSFFLYSKLTVDKS |
| | | | RWQQGNVFSCSVMHEALHNHYTQKSLSLSPG |
| 448 | ATX-P-578 | HC IgG1 Fc | EVQLVESGGGLVQPGGSLRLSCAASGFTFSRYSMNWVRQAPGKGLE |
| | | | WVSYISSSSSTIFHADSVKGRFTISRDNAKNSLYLQMNSLRDEDTAVY |
| | | | YCARGNWNYYYMDVWGKGTTVTVSSASTKGPSVFPLAPSSKSTSGG |
| | | | TAALGCLVKDYFPEPVTVSWNSGALTSGVHTFPAVLQSSGLYSLSSV |
| | | | VTVPSSSLGTQTYICNVNHKPSNTKVDKRVEPKSCDKTHTCPPCPAPE |
| | | | LLGGPSVFLFPPKPKDTLMISRTPEVTCVVVDVSHEDPEVKFNWYVD |
| | | | GVEVHNAKTKPREEQYASTYRVVSVLTVLHQDWLNGKEYKCKVSN |
| | | | KALPAPIEKTISKAKGQPREPQVYTLPPSREEMTKNQVSLTCLVKGFY |
| | | | PSDIAVEWESNGQPENNYKTTPPVLDSDGSFFLYSKLTVDKSRWQQG |
| | | | NVFSCSVMHEALHNHYTQKSLSLSPG |
| 449 | ATX-P-569 | HC IgG1 Fc | EVQLVESGGGLAQFGRSLRLSCAASGFTFDDYAMHWLRQAPGMGLE |
| | | | WVSGISWNSGSIGYADSVKGRFTIARDNAKNSVHLQMNSLRAEDTAL |
| | | | YYCAKDIGNGYTKGDVFDIWGQGTMVTVSSASTKGPSVFPLAPSSKS |
| | | | TSGGTAALGCLVKDYFPEPVTVSWNSGALTSGVHTFPAVLQSSGLYS |
| | | | LSSVVTVPSSSLGTQTYICNVNHKPSNTKVDKRVEPKSCDKTHTCPPC |
| | | | PAPELLGGPSVFLFPPKPKDTLMISRTPEVTCVVVDVSHEDPEVKFNW |
| | | | YVDGVEVHNAKTKPREEQYASTYRVVSVLTVLHQDWLNGKEYKCK |
| | | | VSNKALPAPIEKTISKAKGQPREPQVYTLPPSREEMTKNQVSLTCLVK |
| | | | GFYPSDIAVEWESNGQPENNYKTTPPVLDSDGSFFLYSKLTVDKSRW |
| | | | QQGNVFSCSVMHEALHNHYTQKSLSLSPG |
| 450 | ATX-P-576 | HC IgG1 Fc | EVQLVESGGGLVQPGRSLRLSCTASGFTFDDYEMHWVRQAPGKGLE |
| | | | WVSDISRNSGRIGYADSVKGRFTISRDNAKNSLYLQMNSLRAEDTAL |
| | | | YYCAKDIWGSGYFDYWGQGILVTVSSASTKGPSVFPLAPSSKSTSGGT |
| | | | AALGCLVKDYFPEPVTVSWNSGALTSGVHTFPAVLQSSGLYSLSSVV |
| | | | TVPSSSLGTQTYICNVNHKPSNTKVDKRVEPKSCDKTHTCPPCPAPEL |
| | | | LGGPSVFLFPPKPKDTLMISRTPEVTCVVVDVSHEDPEVKFNWYVDG |
| | | | VEVHNAKTKPREEQYASTYRVVSVLTVLHQDWLNGKEYKCKVSNK |
| | | | ALPAPIEKTISKAKGQPREPQVYTLPPSREEMTKNQVSLTCLVKGFYPS |
| | | | DIAVEWESNGQPENNYKTTPPVLDSDGSFFLYSKLTVDKSRWQQGNV |
| | | | FSCSVMHEALHNHYTQKSLSLSPG |
| 451 | ATX-P-588 | HC IgG1 Fc | EVQLVESGGGLVQPGRSLRLSCAASGFTFEDYAMHWVRQAPGKGLE |
| | | | WVSGISWNSGSIGYADSVKGRFTISRDNAKKSLYLQMNSLRAEDTAL |
| | | | YYCTKDRDDGYNYAGVFDYWGQGTLVTVSSASTKGPSVFPLAPSSK |
| | | | STSGGTAALGCLVKDYFPEPVTVSWNSGALTSGVHTFPAVLQSSGLY |
| | | | SLSSVVTVPSSSLGTQTYICNVNHKPSNTKVDKRVEPKSCDKTHTCPP |
| | | | CPAPELLGGPSVFLFPPKPKDTLMISRTPEVTCVVVDVSHEDPEVKFN |
| | | | WYVDGVEVHNAKTKPREEQYASTYRVVSVLTVLHQDWLNGKEYKC |
| | | | KVSNKALPAPIEKTISKAKGQPREPQVYTLPPSREEMTKNQVSLTCLV |
| | | | KGFYPSDIAVEWESNGQPENNYKTTPPVLDSDGSFFLYSKLTVDKSR |
| | | | WQQGNVFSCSVMHEALHNHYTQKSLSLSPG |
| 452 | ATX-P-596 | HC IgG1 Fc | EVQLVESGGGLVQPGRSLRLSCAASGFSFDDYAMHWVRQVPGKGLE |
| | | | WVSGISWTGGSVGYADPVKGRFTISRDNAKNSLYLQMNSLRPEDTAL |
| | | | YYCAKDMGDGYSRNWPFDYWGQGTLVTVSSASTKGPSVFPLAPSSK |
| | | | STSGGTAALGCLVKDYFPEPVTVSWNSGALTSGVHTFPAVLQSSGLY |
| | | | SLSSVVTVPSSSLGTQTYICNVNHKPSNTKVDKRVEPKSCDKTHTCPP |
| | | | CPAPELLGGPSVFLFPPKPKDTLMISRTPEVTCVVVDVSHEDPEVKFN |
| | | | WYVDGVEVHNAKTKPREEQYASTYRVVSVLTVLHQDWLNGKEYKC |
| | | | KVSNKALPAPIEKTISKAKGQPREPQVYTLPPSREEMTKNQVSLTCLV |
| | | | KGFYPSDIAVEWESNGQPENNYKTTPPVLDSDGSFFLYSKLTVDKSR |
| | | | WQQGNVFSCSVMHEALHNHYTQKSLSLSPG |
| 453 | ATX-P-600 | HC IgG1 Fc | EVQLVESGGGLVQPGRSLRLSCAASGFTFDDYAMHWVRQVPGRGLE |
| | | | WVSGISWSGGSIGYADSVKGRFTISRDNSKNSLYLQMNSLRAEDTAL |
| | | | YYCTKDREDGYNYGGVFDYWGQGTLVTVSSASTKGPSVFPLAPSSKS |
| | | | TSGGTAALGCLVKDYFPEPVTVSWNSGALTSGVHTFPAVLQSSGLYS |
| | | | LSSVVTVPSSSLGTQTYICNVNHKPSNTKVDKRVEPKSCDKTHTCPPC |
| | | | PAPELLGGPSVFLFPPKPKDTLMISRTPEVTCVVVDVSHEDPEVKFNW |
| | | | YVDGVEVHNAKTKPREEQYASTYRVVSVLTVLHQDWLNGKEYKCK |
| | | | VSNKALPAPIEKTISKAKGQPREPQVYTLPPSREEMTKNQVSLTCLVK |
| | | | GFYPSDIAVEWESNGQPENNYKTTPPVLDSDGSFFLYSKLTVDKSRW |
| | | | QQGNVFSCSVMHEALHNHYTQKSLSLSPG |
| 454 | ATX-P-564 | HC IgG1 Fc- | GAGGTGCAGCTGGTGGAGTCTGGGGGAGGCCTGGTCAAGCCTGGG |
| | | nucleotide | GGGTCCCTGAGACTCTCCTGTGCAGCCTCTGGATTCACCTTCAGTA |
| | | | GCTATACCATGAACTGGGTCCGCCAGGCTCCAGGGAAGGGGCTGG |
| | | | AGTGGGTGTCATCCATTAGTAGTAGTAGTAGTTACACATACTACGC |
| | | | AGACTCAGTGAGGGGCCGATTCACCATCTCCAGAGACAACGCCAA |
| | | | GAACTCACTGTATCTGCAAATGAGCAGCCTGAGAGCCGAGGACAC |
| | | | AGCTGTGTATTACTGTGCGAGATCGGCGAGTATAGCAGCTGGGAT |
| | | | GGACGTCTGGGGCAAAGGGACCACGGTCACCGTCTCCTCAGCTAG |
| | | | CACTAAAGGGCCTTCTGTATTTCCCTTGGCCCCGTCCAGCAAATCG |
| | | | ACCTCGGGAGGGACAGCCGCCCTGGGTTGCCTTGTGAAAGATTAT |
| | | | TTCCCTGAGCCAGTTACCGTAAGTTGGAACAGTGGGGCGCTGACA |
| | | | AGTGGTGTGCACACGTTTCCTGCCGTCCTGCAATCATCGGGCTTGT |
| | | | ATAGCCTCAGCTCTGTGGTCACTGTCCCAAGTTCATCGCTGGGCAC |
| | | | TCAGACGTATATTTGCAATGTGAACCACAAACCTTCAAATACAAA |
| | | | AGTGGATAAACGCGTAGAACCGAAATCGTGTGATAAAACTCACAC |
| | | | ATGCCCGCCATGCCCGGCACCTGAACTGCTTGGTGGTCCCAGCGTG |
| | | | TTCCTGTTCCCGCCGAAGCCTAAAGATACTCTAATGATCAGCCGTA |
| | | | CGCCAGAGGTGACATGTGTCGTGGTTGACGTGTCCCACGAAGATC |
| | | | CCGAAGTTAAGTTCAATTGGTATGTTGATGGTGTAGAGGTACACA |
| | | | ATGCTAAGACTAAACCTCGCGAGGAGCAGTACGCCTCGACCTATC |
| | | | GTGTCGTGAGCGTTCTGACCGTCCTTCACCAAGATTGGCTTAACGG |
| | | | CAAAGAATATAAGTGCAAGGTAAGCAATAAAGCACTTCCGGCCCC |
| | | | AATCGAGAAAACCATTTCCAAGGCCAAAGGTCAACCAAGAGAACC |
| | | | CCAGGTGTATACTCTTCCGCCTTCTCGTGAGGAAATGACTAAAAAT |
| | | | CAAGTATCCCTTACGTGTCTGGTTAAAGGTTTTTATCCTAGCGATA |
| | | | TTGCTGTTGAATGGGAATCGAACGGTCAGCCGGAGAATAATTATA |
| | | | AAACAACGCCACCCGTCCTGGATAGCGACGGCTCATTTTTTCTGTA |
| | | | TAGCAAACTGACTGTAGATAAATCACGGTGGCAGCAGGGCAATGT |
| | | | ATTCAGTTGCTCCGTTATGCATGAAGCGTTACATAATCACTACACG |
| | | | CAGAAATCTCTTAGTCTTTCACCCGGT |
| 455 | ATX-P-568 | HC IgG1 Fc- | GAGGTGCAGCTGGTGGAGTCTGGGGGAGGCTTGGTACAGCCGGGG |
| | | nucleotide | GGGTCCCTGAGACTCTCCTGTGCAGCCTCTGGATTCCCCTTTAGCA |
| | | | GCTATGTCATGAGCTGGGTCCGCCAGGCTCCAGGGAAGGGGCTGG |
| | | | AGTGGGTCTCAGTTATAAGTGTTAGTGGTGGTAGTACATTCTACGC |
| | | | AGACTCCGTGAGGGGCCGGTTCACCATCTCCAGAGACAATTCCAA |
| | | | GAACACGCTGTATCTGCAAGTGTACAGCCTGCGAGCCGAGGACAC |
| | | | GGCCGTATATTACTGTGCGAAAGATGGTTTGGCAGTGGCTGGTTTT |
| | | | GACCACTGGGGCCAGGGAACCCTGGTCACCGTCTCCTCAGCTAGC |
| | | | ACTAAAGGGCCTTCTGTATTTCCCTTGGCCCCGTCCAGCAAATCGA |
| | | | CCTCGGGAGGGACAGCCGCCCTGGGTTGCCTTGTGAAAGATTATTT |
| | | | CCCTGAGCCAGTTACCGTAAGTTGGAACAGTGGGGCGCTGACAAG |
| | | | TGGTGTGCACACGTTTCCTGCCGTCCTGCAATCATCGGGCTTGTAT |
| | | | AGCCTCAGCTCTGTGGTCACTGTCCCAAGTTCATCGCTGGGCACTC |
| | | | AGACGTATATTTGCAATGTGAACCACAAACCTTCAAATACAAAAG |
| | | | TGGATAAACGCGTAGAACCGAAATCGTGTGATAAAACTCACACAT |
| | | | GCCCGCCATGCCCGGCACCTGAACTGCTTGGTGGTCCCAGCGTGTT |
| | | | CCTGTTCCCGCCGAAGCCTAAAGATACTCTAATGATCAGCCGTACG |
| | | | CCAGAGGTGACATGTGTCGTGGTTGACGTGTCCCACGAAGATCCC |
| | | | GAAGTTAAGTTCAATTGGTATGTTGATGGTGTAGAGGTACACAAT |
| | | | GCTAAGACTAAACCTCGCGAGGAGCAGTACGCCTCGACCTATCGT |
| | | | GTCGTGAGCGTTCTGACCGTCCTTCACCAAGATTGGCTTAACGGCA |
| | | | AAGAATATAAGTGCAAGGTAAGCAATAAAGCACTTCCGGCCCCAA |
| | | | TCGAGAAAACCATTTCCAAGGCCAAAGGTCAACCAAGAGAACCCC |
| | | | AGGTGTATACTCTTCCGCCTTCTCGTGAGGAAATGACTAAAAATCA |
| | | | AGTATCCCTTACGTGTCTGGTTAAAGGTTTTTATCCTAGCGATATT |
| | | | GCTGTTGAATGGGAATCGAACGGTCAGCCGGAGAATAATTATAAA |
| | | | ACAACGCCACCCGTCCTGGATAGCGACGGCTCATTTTTTCTGTATA |
| | | | GCAAACTGACTGTAGATAAATCACGGTGGCAGCAGGGCAATGTAT |
| | | | TCAGTTGCTCCGTTATGCATGAAGCGTTACATAATCACTACACGCA |
| | | | GAAATCTCTTAGTCTTTCACCCGGT |
| 456 | ATX-P-574 | HC IgG1 Fc- | GAGGTGCAGCTGGTGGAGTCTGGGGGAGGCTTGGTACAGCGGGGG |
| | | nucleotide | GGGTCCCTGAGACTCTCCTGTGTAGCCTCTGGATTCACCTTTAGTA |
| | | | GCTATGCCATGAGCTGGGTCCGCCAGGCTCCAGGGAAGGGGCTGG |
| | | | AGTGGGTCTCAGTTATTAGTGGTAGTGGTGGTACCACATACTACGC |
| | | | AGACTCCGTGAAGGGCCGGTTCACCATCTCCAGAGACGATTCCAA |
| | | | GAAGACACTGTATCTGCAAATGAACAGCCTGAGAGCCGAGGACAC |
| | | | GGCCGTATATTATTGTGCGAAAAGGGGTGACTACGGGGACTACAT |
| | | | GGACGTCTGGGGCAAAGGGACCACGGTCACCGTCTCCTCAGCTAG |
| | | | CACTAAAGGGCCTTCTGTATTTCCCTTGGCCCCGTCCAGCAAATCG |
| | | | ACCTCGGGAGGGACAGCCGCCCTGGGTTGCCTTGTGAAAGATTAT |
| | | | TTCCCTGAGCCAGTTACCGTAAGTTGGAACAGTGGGGCGCTGACA |
| | | | AGTGGTGTGCACACGTTTCCTGCCGTCCTGCAATCATCGGGCTTGT |
| | | | ATAGCCTCAGCTCTGTGGTCACTGTCCCAAGTTCATCGCTGGGCAC |
| | | | TCAGACGTATATTTGCAATGTGAACCACAAACCTTCAAATACAAA |
| | | | AGTGGATAAACGCGTAGAACCGAAATCGTGTGATAAAACTCACAC |
| | | | ATGCCCGCCATGCCCGGCACCTGAACTGCTTGGTGGTCCCAGCGTG |
| | | | TTCCTGTTCCCGCCGAAGCCTAAAGATACTCTAATGATCAGCCGTA |
| | | | CGCCAGAGGTGACATGTGTCGTGGTTGACGTGTCCCACGAAGATC |
| | | | CCGAAGTTAAGTTCAATTGGTATGTTGATGGTGTAGAGGTACACA |
| | | | ATGCTAAGACTAAACCTCGCGAGGAGCAGTACGCCTCGACCTATC |
| | | | GTGTCGTGAGCGTTCTGACCGTCCTTCACCAAGATTGGCTTAACGG |
| | | | CAAAGAATATAAGTGCAAGGTAAGCAATAAAGCACTTCCGGCCCC |
| | | | AATCGAGAAAACCATTTCCAAGGCCAAAGGTCAACCAAGAGAACC |
| | | | CCAGGTGTATACTCTTCCGCCTTCTCGTGAGGAAATGACTAAAAAT |
| | | | CAAGTATCCCTTACGTGTCTGGTTAAAGGTTTTTATCCTAGCGATA |
| | | | TTGCTGTTGAATGGGAATCGAACGGTCAGCCGGAGAATAATTATA |
| | | | AAACAACGCCACCCGTCCTGGATAGCGACGGCTCATTTTTTCTGTA |
| | | | TAGCAAACTGACTGTAGATAAATCACGGTGGCAGCAGGGCAATGT |
| | | | ATTCAGTTGCTCCGTTATGCATGAAGCGTTACATAATCACTACACG |
| | | | CAGAAATCTCTTAGTCTTTCACCCGGT |
| 457 | ATX-P-565 | HC IgG1 Fc- | CAGGTGCAGCTGGTGGAGTCTGGGGGAGGCGTGGTCCAGCCTGGG |
| | | nucleotide | AGGTCCCTGAGACTCTCCTGTGCAGCGTCTGGATTCACCTTCAATA |
| | | | CCTATGGCATCCACTGGGTCCGCCAGGCTCCAGGCAAGGGACTGG |
| | | | AGTGGGTGGCAGTTATATGGCATGATGGAAGTAGTAAAAACTATG |
| | | | TAGACTCCGTGACGGGCCGATTCACCATCTCCAGAGACAATTCCA |
| | | | AGAACACGGTGTATCTGCAAATGAACAGCCTGAGAGCCGAGGACA |
| | | | CGGCTGTTTATTACTGTGCGAGAAGGGGTAACTGGAACTACGGCT |
| | | | TCTACTACTACTACATGGACGTCTGGGGCAAAGGAACCACGGTCA |
| | | | CCGTCTCCTCAGCTAGCACTAAAGGGCCTTCTGTATTTCCCTTGGC |
| | | | CCCGTCCAGCAAATCGACCTCGGGAGGGACAGCCGCCCTGGGTTG |
| | | | CCTTGTGAAAGATTATTTCCCTGAGCCAGTTACCGTAAGTTGGAAC |
| | | | AGTGGGGCGCTGACAAGTGGTGTGCACACGTTTCCTGCCGTCCTGC |
| | | | AATCATCGGGCTTGTATAGCCTCAGCTCTGTGGTCACTGTCCCAAG |
| | | | TTCATCGCTGGGCACTCAGACGTATATTTGCAATGTGAACCACAAA |
| | | | CCTTCAAATACAAAAGTGGATAAACGCGTAGAACCGAAATCGTGT |
| | | | GATAAAACTCACACATGCCCGCCATGCCCGGCACCTGAACTGCTT |
| | | | GGTGGTCCCAGCGTGTTCCTGTTCCCGCCGAAGCCTAAAGATACTC |
| | | | TAATGATCAGCCGTACGCCAGAGGTGACATGTGTCGTGGTTGACG |
| | | | TGTCCCACGAAGATCCCGAAGTTAAGTTCAATTGGTATGTTGATGG |
| | | | TGTAGAGGTACACAATGCTAAGACTAAACCTCGCGAGGAGCAGTA |
| | | | CGCCTCGACCTATCGTGTCGTGAGCGTTCTGACCGTCCTTCACCAA |
| | | | GATTGGCTTAACGGCAAAGAATATAAGTGCAAGGTAAGCAATAAA |
| | | | GCACTTCCGGCCCCAATCGAGAAAACCATTTCCAAGGCCAAAGGT |
| | | | CAACCAAGAGAACCCCAGGTGTATACTCTTCCGCCTTCTCGTGAGG |
| | | | AAATGACTAAAAATCAAGTATCCCTTACGTGTCTGGTTAAAGGTTT |
| | | | TTATCCTAGCGATATTGCTGTTGAATGGGAATCGAACGGTCAGCCG |
| | | | GAGAATAATTATAAAACAACGCCACCCGTCCTGGATAGCGACGGC |
| | | | TCATTTTTTCTGTATAGCAAACTGACTGTAGATAAATCACGGTGGC |
| | | | AGCAGGGCAATGTATTCAGTTGCTCCGTTATGCATGAAGCGTTACA |
| | | | TAATCACTACACGCAGAAATCTCTTAGTCTTTCACCCGGT |
| 458 | ATX-P-578 | HC IgG1 Fc- | GAGGTGCAGCTGGTGGAGTCTGGGGGAGGTTTGGTACAGCCTGGG |
| | | nucleotide | GGGTCCCTGAGACTCTCCTGTGCAGCCTCTGGATTCACCTTCAGTA |
| | | | GATATAGCATGAACTGGGTCCGCCAGGCTCCAGGGAAGGGGCTGG |
| | | | AGTGGGTTTCATACATTAGTAGTAGTAGTAGTACCATTTTCCATGC |
| | | | AGACTCTGTGAAGGGCCGATTCACCATCTCCAGAGACAATGCCAA |
| | | | GAACTCACTGTACCTGCAAATGAACAGCCTGAGAGACGAGGACAC |
| | | | GGCTGTGTATTACTGTGCGAGAGGGAACTGGAACTACTACTACAT |
| | | | GGACGTCTGGGGCAAAGGGACCACGGTCACCGTCTCCTCAGCTAG |
| | | | CACTAAAGGGCCTTCTGTATTTCCCTTGGCCCCGTCCAGCAAATCG |
| | | | ACCTCGGGAGGGACAGCCGCCCTGGGTTGCCTTGTGAAAGATTAT |
| | | | TTCCCTGAGCCAGTTACCGTAAGTTGGAACAGTGGGGCGCTGACA |
| | | | AGTGGTGTGCACACGTTTCCTGCCGTCCTGCAATCATCGGGCTTGT |
| | | | ATAGCCTCAGCTCTGTGGTCACTGTCCCAAGTTCATCGCTGGGCAC |
| | | | TCAGACGTATATTTGCAATGTGAACCACAAACCTTCAAATACAAA |
| | | | AGTGGATAAACGCGTAGAACCGAAATCGTGTGATAAAACTCACAC |
| | | | ATGCCCGCCATGCCCGGCACCTGAACTGCTTGGTGGTCCCAGCGTG |
| | | | TTCCTGTTCCCGCCGAAGCCTAAAGATACTCTAATGATCAGCCGTA |
| | | | CGCCAGAGGTGACATGTGTCGTGGTTGACGTGTCCCACGAAGATC |
| | | | CCGAAGTTAAGTTCAATTGGTATGTTGATGGTGTAGAGGTACACA |
| | | | ATGCTAAGACTAAACCTCGCGAGGAGCAGTACGCCTCGACCTATC |
| | | | GTGTCGTGAGCGTTCTGACCGTCCTTCACCAAGATTGGCTTAACGG |
| | | | CAAAGAATATAAGTGCAAGGTAAGCAATAAAGCACTTCCGGCCCC |
| | | | AATCGAGAAAACCATTTCCAAGGCCAAAGGTCAACCAAGAGAACC |
| | | | CCAGGTGTATACTCTTCCGCCTTCTCGTGAGGAAATGACTAAAAAT |
| | | | CAAGTATCCCTTACGTGTCTGGTTAAAGGTTTTTATCCTAGCGATA |
| | | | TTGCTGTTGAATGGGAATCGAACGGTCAGCCGGAGAATAATTATA |
| | | | AAACAACGCCACCCGTCCTGGATAGCGACGGCTCATTTTTTCTGTA |
| | | | TAGCAAACTGACTGTAGATAAATCACGGTGGCAGCAGGGCAATGT |
| | | | ATTCAGTTGCTCCGTTATGCATGAAGCGTTACATAATCACTACACG |
| | | | CAGAAATCTCTTAGTCTTTCACCCGGT |
| 459 | ATX-P-569 | HC IgG1 Fc- | GAAGTGCAGCTGGTGGAGTCTGGGGGAGGCTTGGCACAGTTTGGC |
| | | nucleotide | AGGTCCCTGAGACTCTCCTGTGCAGCCTCTGGATTCACCTTTGATG |
| | | | ATTATGCCATGCACTGGCTCCGGCAAGCTCCAGGGATGGGCCTGG |
| | | | AGTGGGTCTCAGGTATTAGTTGGAATAGCGGGAGCATAGGCTATG |
| | | | CGGACTCTGTGAAGGGCCGATTCACCATCGCCAGAGACAACGCCA |
| | | | AGAACTCCGTGCATCTGCAAATGAACAGTCTGAGAGCTGAGGACA |
| | | | CGGCCTTGTATTACTGTGCAAAAGATATAGGAAATGGATATACGA |
| | | | AGGGTGATGTTTTTGATATCTGGGGACAAGGGACAATGGTCACCG |
| | | | TCTCTTCAGCTAGCACTAAAGGGCCTTCTGTATTTCCCTTGGCCCC |
| | | | GTCCAGCAAATCGACCTCGGGAGGGACAGCCGCCCTGGGTTGCCT |
| | | | TGTGAAAGATTATTTCCCTGAGCCAGTTACCGTAAGTTGGAACAGT |
| | | | GGGGCGCTGACAAGTGGTGTGCACACGTTTCCTGCCGTCCTGCAAT |
| | | | CATCGGGCTTGTATAGCCTCAGCTCTGTGGTCACTGTCCCAAGTTC |
| | | | ATCGCTGGGCACTCAGACGTATATTTGCAATGTGAACCACAAACC |
| | | | TTCAAATACAAAAGTGGATAAACGCGTAGAACCGAAATCGTGTGA |
| | | | TAAAACTCACACATGCCCGCCATGCCCGGCACCTGAACTGCTTGGT |
| | | | GGTCCCAGCGTGTTCCTGTTCCCGCCGAAGCCTAAAGATACTCTAA |
| | | | TGATCAGCCGTACGCCAGAGGTGACATGTGTCGTGGTTGACGTGT |
| | | | CCCACGAAGATCCCGAAGTTAAGTTCAATTGGTATGTTGATGGTGT |
| | | | AGAGGTACACAATGCTAAGACTAAACCTCGCGAGGAGCAGTACGC |
| | | | CTCGACCTATCGTGTCGTGAGCGTTCTGACCGTCCTTCACCAAGAT |
| | | | TGGCTTAACGGCAAAGAATATAAGTGCAAGGTAAGCAATAAAGCA |
| | | | CTTCCGGCCCCAATCGAGAAAACCATTTCCAAGGCCAAAGGTCAA |
| | | | CCAAGAGAACCCCAGGTGTATACTCTTCCGCCTTCTCGTGAGGAA |
| | | | ATGACTAAAAATCAAGTATCCCTTACGTGTCTGGTTAAAGGTTTTT |
| | | | ATCCTAGCGATATTGCTGTTGAATGGGAATCGAACGGTCAGCCGG |
| | | | AGAATAATTATAAAACAACGCCACCCGTCCTGGATAGCGACGGCT |
| | | | CATTTTTTCTGTATAGCAAACTGACTGTAGATAAATCACGGTGGCA |
| | | | GCAGGGCAATGTATTCAGTTGCTCCGTTATGCATGAAGCGTTACAT |
| | | | AATCACTACACGCAGAAATCTCTTAGTCTTTCACCCGGT |
| 460 | ATX-P-576 | HC IgG1 Fc- | GAAGTGCAGCTGGTGGAGTCTGGGGGAGGCTTGGTACAGCCTGGC |
| | | nucleotide | AGGTCCCTGAGACTCTCCTGTACAGCCTCTGGATTCACATTTGATG |
| | | | ATTATGAAATGCACTGGGTCCGGCAAGCTCCAGGGAAGGGCCTGG |
| | | | AGTGGGTCTCAGATATTAGTCGGAACAGTGGTAGAATAGGCTATG |
| | | | CGGACTCTGTGAAGGGCCGATTCACCATTTCCAGAGACAACGCCA |
| | | | AGAACTCCCTGTATCTACAAATGAACAGTCTGAGAGCTGAGGACA |
| | | | CGGCCTTGTATTACTGTGCAAAAGATATTTGGGGATCGGGGTACTT |
| | | | TGACTATTGGGGCCAGGGAATCCTGGTCACCGTCTCCTCAGCTAGC |
| | | | ACTAAAGGGCCTTCTGTATTTCCCTTGGCCCCGTCCAGCAAATCGA |
| | | | CCTCGGGAGGGACAGCCGCCCTGGGTTGCCTTGTGAAAGATTATTT |
| | | | CCCTGAGCCAGTTACCGTAAGTTGGAACAGTGGGGCGCTGACAAG |
| | | | TGGTGTGCACACGTTTCCTGCCGTCCTGCAATCATCGGGCTTGTAT |
| | | | AGCCTCAGCTCTGTGGTCACTGTCCCAAGTTCATCGCTGGGCACTC |
| | | | AGACGTATATTTGCAATGTGAACCACAAACCTTCAAATACAAAAG |
| | | | TGGATAAACGCGTAGAACCGAAATCGTGTGATAAAACTCACACAT |
| | | | GCCCGCCATGCCCGGCACCTGAACTGCTTGGTGGTCCCAGCGTGTT |
| | | | CCTGTTCCCGCCGAAGCCTAAAGATACTCTAATGATCAGCCGTACG |
| | | | CCAGAGGTGACATGTGTCGTGGTTGACGTGTCCCACGAAGATCCC |
| | | | GAAGTTAAGTTCAATTGGTATGTTGATGGTGTAGAGGTACACAAT |
| | | | GCTAAGACTAAACCTCGCGAGGAGCAGTACGCCTCGACCTATCGT |
| | | | GTCGTGAGCGTTCTGACCGTCCTTCACCAAGATTGGCTTAACGGCA |
| | | | AAGAATATAAGTGCAAGGTAAGCAATAAAGCACTTCCGGCCCCAA |
| | | | TCGAGAAAACCATTTCCAAGGCCAAAGGTCAACCAAGAGAACCCC |
| | | | AGGTGTATACTCTTCCGCCTTCTCGTGAGGAAATGACTAAAAATCA |
| | | | AGTATCCCTTACGTGTCTGGTTAAAGGTTTTTATCCTAGCGATATT |
| | | | GCTGTTGAATGGGAATCGAACGGTCAGCCGGAGAATAATTATAAA |
| | | | ACAACGCCACCCGTCCTGGATAGCGACGGCTCATTTTTTCTGTATA |
| | | | GCAAACTGACTGTAGATAAATCACGGTGGCAGCAGGGCAATGTAT |
| | | | TCAGTTGCTCCGTTATGCATGAAGCGTTACATAATCACTACACGCA |
| | | | GAAATCTCTTAGTCTTTCACCCGGT |
| 461 | ATX-P-588 | HC IgG1 Fc- | GAAGTGCAGCTGGTGGAGTCCGGGGGAGGCTTGGTACAACCTGGC |
| | | nucleotide | AGGTCCCTGAGACTCTCCTGTGCAGCCTCTGGATTCACCTTTGAAG |
| | | | ATTATGCCATGCACTGGGTCCGGCAAGCTCCAGGGAAGGGCCTGG |
| | | | AGTGGGTCTCAGGTATTAGTTGGAATAGTGGTAGCATAGGCTATG |
| | | | CGGACTCTGTGAAGGGCCGATTCACCATCTCCAGAGACAACGCCA |
| | | | AGAAATCCCTGTATCTGCAAATGAACAGTCTGAGAGCTGAGGACA |
| | | | CGGCCTTATATTACTGTACAAAAGATAGAGATGATGGCTACAACT |
| | | | ATGCGGGGGTCTTTGACTACTGGGGCCAGGGAACCCTGGTCACTG |
| | | | TCTCCTCAGCTAGCACTAAAGGGCCTTCTGTATTTCCCTTGGCCCC |
| | | | GTCCAGCAAATCGACCTCGGGAGGGACAGCCGCCCTGGGTTGCCT |
| | | | TGTGAAAGATTATTTCCCTGAGCCAGTTACCGTAAGTTGGAACAGT |
| | | | GGGGCGCTGACAAGTGGTGTGCACACGTTTCCTGCCGTCCTGCAAT |
| | | | CATCGGGCTTGTATAGCCTCAGCTCTGTGGTCACTGTCCCAAGTTC |
| | | | ATCGCTGGGCACTCAGACGTATATTTGCAATGTGAACCACAAACC |
| | | | TTCAAATACAAAAGTGGATAAACGCGTAGAACCGAAATCGTGTGA |
| | | | TAAAACTCACACATGCCCGCCATGCCCGGCACCTGAACTGCTTGGT |
| | | | GGTCCCAGCGTGTTCCTGTTCCCGCCGAAGCCTAAAGATACTCTAA |
| | | | TGATCAGCCGTACGCCAGAGGTGACATGTGTCGTGGTTGACGTGT |
| | | | CCCACGAAGATCCCGAAGTTAAGTTCAATTGGTATGTTGATGGTGT |
| | | | AGAGGTACACAATGCTAAGACTAAACCTCGCGAGGAGCAGTACGC |
| | | | CTCGACCTATCGTGTCGTGAGCGTTCTGACCGTCCTTCACCAAGAT |
| | | | TGGCTTAACGGCAAAGAATATAAGTGCAAGGTAAGCAATAAAGCA |
| | | | CTTCCGGCCCCAATCGAGAAAACCATTTCCAAGGCCAAAGGTCAA |
| | | | CCAAGAGAACCCCAGGTGTATACTCTTCCGCCTTCTCGTGAGGAA |
| | | | ATGACTAAAAATCAAGTATCCCTTACGTGTCTGGTTAAAGGTTTTT |
| | | | ATCCTAGCGATATTGCTGTTGAATGGGAATCGAACGGTCAGCCGG |
| | | | AGAATAATTATAAAACAACGCCACCCGTCCTGGATAGCGACGGCT |
| | | | CATTTTTTCTGTATAGCAAACTGACTGTAGATAAATCACGGTGGCA |
| | | | GCAGGGCAATGTATTCAGTTGCTCCGTTATGCATGAAGCGTTACAT |
| | | | AATCACTACACGCAGAAATCTCTTAGTCTTTCACCCGGT |
| 462 | ATX-P-596 | HC IgG1 Fc- | GAAGTGCAGCTGGTGGAGTCTGGGGGAGGCTTGGTACAGCCTGGC |
| | | nucleotide | AGGTCCCTGAGACTCTCCTGTGCAGCCTCTGGGTTCAGTTTTGATG |
| | | | ATTATGCCATGCACTGGGTCCGGCAAGTTCCAGGGAAGGGCCTGG |
| | | | AATGGGTCTCAGGTATTAGTTGGACTGGTGGTAGCGTAGGCTATG |
| | | | CGGACCCCGTGAAGGGCCGATTCACCATCTCCAGAGACAACGCCA |
| | | | AGAACTCCCTGTATCTGCAAATGAACAGTCTGAGACCTGAGGACA |
| | | | CGGCCTTGTATTACTGTGCAAAAGATATGGGAGACGGGTATAGCA |
| | | | GAAACTGGCCCTTTGACTACTGGGGCCAGGGAACCCTGGTCACCG |
| | | | TCTCCTCAGCTAGCACTAAAGGGCCTTCTGTATTTCCCTTGGCCCC |
| | | | GTCCAGCAAATCGACCTCGGGAGGGACAGCCGCCCTGGGTTGCCT |
| | | | TGTGAAAGATTATTTCCCTGAGCCAGTTACCGTAAGTTGGAACAGT |
| | | | GGGGCGCTGACAAGTGGTGTGCACACGTTTCCTGCCGTCCTGCAAT |
| | | | CATCGGGCTTGTATAGCCTCAGCTCTGTGGTCACTGTCCCAAGTTC |
| | | | ATCGCTGGGCACTCAGACGTATATTTGCAATGTGAACCACAAACC |
| | | | TTCAAATACAAAAGTGGATAAACGCGTAGAACCGAAATCGTGTGA |
| | | | TAAAACTCACACATGCCCGCCATGCCCGGCACCTGAACTGCTTGGT |
| | | | GGTCCCAGCGTGTTCCTGTTCCCGCCGAAGCCTAAAGATACTCTAA |
| | | | TGATCAGCCGTACGCCAGAGGTGACATGTGTCGTGGTTGACGTGT |
| | | | CCCACGAAGATCCCGAAGTTAAGTTCAATTGGTATGTTGATGGTGT |
| | | | AGAGGTACACAATGCTAAGACTAAACCTCGCGAGGAGCAGTACGC |
| | | | CTCGACCTATCGTGTCGTGAGCGTTCTGACCGTCCTTCACCAAGAT |
| | | | TGGCTTAACGGCAAAGAATATAAGTGCAAGGTAAGCAATAAAGCA |
| | | | CTTCCGGCCCCAATCGAGAAAACCATTTCCAAGGCCAAAGGTCAA |
| | | | CCAAGAGAACCCCAGGTGTATACTCTTCCGCCTTCTCGTGAGGAA |
| | | | ATGACTAAAAATCAAGTATCCCTTACGTGTCTGGTTAAAGGTTTTT |
| | | | ATCCTAGCGATATTGCTGTTGAATGGGAATCGAACGGTCAGCCGG |
| | | | AGAATAATTATAAAACAACGCCACCCGTCCTGGATAGCGACGGCT |
| | | | CATTTTTTCTGTATAGCAAACTGACTGTAGATAAATCACGGTGGCA |
| | | | GCAGGGCAATGTATTCAGTTGCTCCGTTATGCATGAAGCGTTACAT |
| | | | AATCACTACACGCAGAAATCTCTTAGTCTTTCACCCGGT |
| 463 | ATX-P-600 | HC IgG1 Fc- | GAAGTGCAGCTGGTGGAGTCTGGGGGAGGCTTGGTACAGCCTGGC |
| | | nucleotide | AGGTCCCTGAGACTCTCCTGTGCAGCCTCTGGATTCACCTTTGATG |
| | | | ATTATGCCATGCACTGGGTCCGGCAAGTTCCAGGGAGGGGCCTGG |
| | | | AGTGGGTCTCAGGTATTAGTTGGAGTGGTGGCAGCATAGGCTATG |
| | | | CGGACTCTGTGAAGGGCCGATTCACCATCTCCAGAGACAACTCCA |
| | | | AGAACTCCCTGTATCTGCAAATGAACAGTCTGAGAGCTGAGGACA |
| | | | CGGCCTTGTATTACTGTACAAAAGATAGAGAAGATGGATACAACT |
| | | | ATGGGGGGGTCTTTGACTACTGGGGCCAGGGAACCCTGGTCACCG |
| | | | TCTCCTCAGCTAGCACTAAAGGGCCTTCTGTATTTCCCTTGGCCCC |
| | | | GTCCAGCAAATCGACCTCGGGAGGGACAGCCGCCCTGGGTTGCCT |
| | | | TGTGAAAGATTATTTCCCTGAGCCAGTTACCGTAAGTTGGAACAGT |
| | | | GGGGCGCTGACAAGTGGTGTGCACACGTTTCCTGCCGTCCTGCAAT |
| | | | CATCGGGCTTGTATAGCCTCAGCTCTGTGGTCACTGTCCCAAGTTC |
| | | | ATCGCTGGGCACTCAGACGTATATTTGCAATGTGAACCACAAACC |
| | | | TTCAAATACAAAAGTGGATAAACGCGTAGAACCGAAATCGTGTGA |
| | | | TAAAACTCACACATGCCCGCCATGCCCGGCACCTGAACTGCTTGGT |
| | | | GGTCCCAGCGTGTTCCTGTTCCCGCCGAAGCCTAAAGATACTCTAA |
| | | | TGATCAGCCGTACGCCAGAGGTGACATGTGTCGTGGTTGACGTGT |
| | | | CCCACGAAGATCCCGAAGTTAAGTTCAATTGGTATGTTGATGGTGT |
| | | | AGAGGTACACAATGCTAAGACTAAACCTCGCGAGGAGCAGTACGC |
| | | | CTCGACCTATCGTGTCGTGAGCGTTCTGACCGTCCTTCACCAAGAT |
| | | | TGGCTTAACGGCAAAGAATATAAGTGCAAGGTAAGCAATAAAGCA |
| | | | CTTCCGGCCCCAATCGAGAAAACCATTTCCAAGGCCAAAGGTCAA |
| | | | CCAAGAGAACCCCAGGTGTATACTCTTCCGCCTTCTCGTGAGGAA |
| | | | ATGACTAAAAATCAAGTATCCCTTACGTGTCTGGTTAAAGGTTTTT |
| | | | ATCCTAGCGATATTGCTGTTGAATGGGAATCGAACGGTCAGCCGG |
| | | | AGAATAATTATAAAACAACGCCACCCGTCCTGGATAGCGACGGCT |
| | | | CATTTTTTCTGTATAGCAAACTGACTGTAGATAAATCACGGTGGCA |
| | | | GCAGGGCAATGTATTCAGTTGCTCCGTTATGCATGAAGCGTTACAT |
| | | | AATCACTACACGCAGAAATCTCTTAGTCTTTCACCCGGT |
| 464 | ATX-P-564 | LC Kappa | DIVMTQSPLSLPVTPGEPASISCRSSQSLLHSTGYNFLDWYLQKPGLSP |
| | | | QLLIYLASNRASGVPDRFSGSGSGTDFTLKISRVEAEDVGVYYCMQA |
| | | | LQTPYTFGQGTKLEIKRTVAAPSVFIFPPSDEQLKSGTASVVCLLNNFY |
| | | | PREAKVQWKVDNALQSGNSQESVTEQDSKDSTYSLSSTLTLSKADYE |
| | | | KHKVYACEVTHQGLSSPVTKSFNRGEC |
| 465 | ATX-P-568 | LC Kappa | DIQMTQSPSTLSASVGDRVTITCRASQSISTWLAWYQQKPGKAPKLLI |
| | | | HKASGLESGVPSRFSGSGSGTEFTLTISSLQPDDFATYYCQQYNSFSLIF |
| | | | GGGTRVEIKRTVAAPSVFIFPPSDEQLKSGTASVVCLLNNFYPREAKV |
| | | | QWKVDNALQSGNSQESVTEQDSKDSTYSLSSTLTLSKADYEKHKVY |
| | | | ACEVTHQGLSSPVTKSFNRGEC |
| 466 | ATX-P-574 | LC Kappa | DIQMTQSPSSVSASVGDRVTITCRASQGITTWLAWYQQKPGKAPKLLI |
| | | | FGASSLESGVPSRFSGSGSGTDFTLTISSLQPEDFATYYCQQANSFPWT |
| | | | FGQGTKVEIKRTVAAPSVFIFPPSDEQLKSGTASVVCLLNNFYPREAK |
| | | | VQWKVDNALQSGNSQESVTEQDSKDSTYSLSSTLILSKADYEKHKV |
| | | | YACEVTHQGLSSPVTKSFNRGEC |
| 467 | ATX-P-565 | LC Kappa | DIVMTQSPLSLPVTPGEPASISCRSSQRLLHSSGYNYLDWYLQKPGQS |
| | | | PQLLIYLGSSRASGVPDRFSGSGSGTDFTLKISRVEAEDVGVYYCMQG |
| | | | LQTPPTFGQGTKVEIKRTVAAPSVFIFPPSDEQLKSGTASVVCLLNNFY |
| | | | PREAKVQWKVDNALQSGNSQESVTEQDSKDSTYSLSSTLTLSKADYE |
| | | | KHKVYACEVTHQGLSSPVTKSFNRGEC |
| 468 | ATX-P-578 | LC Kappa | DIQMTQSPSTLSASVGDRVTISCRASQSVNSWLAWYQQKPGKAPKLL |
| | | | IYKASNLEGGVPSSFSGSGSGTEFTLTISSLQPDDFATYYCQQYDTSWT |
| | | | FGQGTKVEIKRTVAAPSVFIFPPSDEQLKSGTASVVCLLNNFYPREAK |
| | | | VQWKVDNALQSGNSQESVTEQDSKDSTYSLSSTLTLSKADYEKHKV |
| | | | YACEVTHQGLSSPVTKSFNRGEC |
| 469 | ATX-P-569 | LC Kappa | DIQMTQSPSTLSASVGDSVTITCRASQNIITWLAWYQQKPGKAPNLLI |
| | | | YKASSLESGVPSRFSGSGSGTEFTLTISSLQPDDFATYYCQQYSSYSYT |
| | | | FGQGTKLEIKRTVAAPSVFIFPPSDEQLKSGTASVVCLLNNFYPREAK |
| | | | VQWKVDNALQSGNSQESVTEQDSKDSTYSLSSTLTLSKADYEKHKV |
| | | | YACEVTHQGLSSPVTKSFNRGEC |
| 470 | ATX-P-576 | LC Kappa | DIQMTQSPSSVSASVGDRVTITCRTSQGIRNWLAWYQQKPGKAPKLLI |
| | | | YAASSLQTGGPSRFSGSGSGTDFTLTISSLQPEDFATYYCQQANSFPYT |
| | | | FGQGTKLEIKRTVAAPSVFIFPPSDEQLKSGTASVVCLLNNFYPREAK |
| | | | VQWKVDNALQSGNSQESVTEQDSKDSTYSLSSTLTLSKADYEKHKV |
| | | | YACEVTHQGLSSPVTKSFNRGEC |
| 471 | ATX-P-588 | LC Kappa | EIVLTQSPATLSVSPGERATLSCRASQSVSSNLAWYQQKPGQAPRLLI |
| | | | YGASSRATGIPDRFSGSGSGTDFTLTISRLEPEDFAVYYCQQYGSSFTF |
| | | | GPGTKVDIKRTVAAPSVFIFPPSDEQLKSGTASVVCLLNNFYPREAKV |
| | | | QWKVDNALQSGNSQESVTEQDSKDSTYSLSSTLTLSKADYEKHKVY |
| | | | ACEVTHQGLSSPVTKSFNRGEC |
| 472 | ATX-P-596 | LC Kappa | DIVMTQSPDSLAVSLGERATINCKSSQSVLYSSNNKNYLAWYQQKPG |
| | | | QPPKLLIYWASTRESGVPDRFSGSGSGTDFTLTISSLQAEDVAVYYCQ |
| | | | QYGSSPMYTFGQGTKLEIKRTVAAPSVFIFPPSDEQLKSGTASVVCLL |
| | | | NNFYPREAKVQWKVDNALQSGNSQESVTEQDSKDSTYSLSSTLTLSK |
| | | | ADYEKHKVYACEVTHQGLSSPVTKSFNRGEC |
| 473 | ATX-P-600 | LC Kappa | EIVLTQSPGTLSLSPGERATLSCRASQNVRGSYLAWYQQKPGQAPRLL |
| | | | IYGASNRATDIPDRFSGSGSGTDFTLTISGLEPEDFVVYYCQQYGSSYT |
| | | | FGQGTKVEIKRTVAAPSVFIFPPSDEQLKSGTASVVCLLNNFYPREAK |
| | | | VQWKVDNALQSGNSQESVTEQDSKDSTYSLSSTLTLSKADYEKHKV |
| | | | YACEVTHQGLSSPVTKSFNRGEC |
| 474 | ATX-P-564 | LC Kappa- | GATATTGTGATGACTCAGTCTCCACTCTCCCTGCCCGTCACCCCTG |
| | | nucleotide | GAGAGCCGGCCTCCATCTCCTGCAGGTCTAGTCAGAGCCTCCTGCA |
| | | | TAGTACTGGATACAACTTTTTGGATTGGTACCTGCAGAAGCCAGG |
| | | | GCTGTCTCCACAGCTCCTGATCTATTTGGCTTCTAATCGGGCCTCC |
| | | | GGGGTCCCTGACAGGTTCAGTGGCAGTGGATCAGGCACAGATTTT |
| | | | ACACTGAAAATCAGCAGAGTGGAGGCTGAGGATGTTGGGGTTTAT |
| | | | TACTGCATGCAAGCTCTACAAACTCCGTACACTTTTGGCCAGGGGA |
| | | | CCAAGCTGGAGATCAAACGTACGGTAGCTGCCCCTTCAGTTTTTAT |
| | | | CTTTCCGCCGTCTGACGAGCAGTTAAAATCCGGGACCGCTTCTGTA |
| | | | GTTTGCCTGCTGAATAATTTTTATCCGCGTGAGGCTAAAGTACAAT |
| | | | GGAAAGTCGACAATGCTTTGCAGTCGGGAAATTCACAGGAAAGTG |
| | | | TTACGGAGCAGGATTCTAAAGATTCCACATATTCACTCAGCTCCAC |
| | | | CCTTACACTGAGCAAAGCCGACTATGAAAAACATAAAGTTTACGC |
| | | | ATGTGAGGTGACGCACCAAGGATTATCCAGTCCGGTCACAAAATC |
| | | | GTTTAACCGCGGTGAGTGT |
| 475 | ATX-P-568 | LC Kappa- | GACATCCAGATGACCCAGTCTCCTTCCACCCTGTCTGCCTCTGTAG |
| | | nucleotide | GAGACAGAGTCACCATCACTTGCCGGGCCAGCCAGAGTATTAGTA |
| | | | CCTGGTTGGCCTGGTATCAGCAGAAACCAGGGAAAGCCCCTAAGC |
| | | | TCCTGATCCATAAGGCGTCTGGTTTAGAAAGTGGGGTCCCATCAA |
| | | | GATTCAGCGGCAGTGGATCTGGGACAGAATTCACTCTCACCATCA |
| | | | GCAGCCTGCAGCCTGATGATTTTGCAACTTATTACTGCCAACAGTA |
| | | | TAATAGTTTTTCTCTCATTTTCGGCGGAGGGACCAGGGTGGAGATC |
| | | | AAACGTACGGTAGCTGCCCCTTCAGTTTTTATCTTTCCGCCGTCTG |
| | | | ACGAGCAGTTAAAATCCGGGACCGCTTCTGTAGTTTGCCTGCTGAA |
| | | | TAATTTTTATCCGCGTGAGGCTAAAGTACAATGGAAAGTCGACAA |
| | | | TGCTTTGCAGTCGGGAAATTCACAGGAAAGTGTTACGGAGCAGGA |
| | | | TTCTAAAGATTCCACATATTCACTCAGCTCCACCCTTACACTGAGC |
| | | | AAAGCCGACTATGAAAAACATAAAGTTTACGCATGTGAGGTGACG |
| | | | CACCAAGGATTATCCAGTCCGGTCACAAAATCGTTTAACCGCGGT |
| | | | GAGTGT |
| 476 | ATX-P-574 | LC Kappa- | GACATCCAGATGACCCAGTCTCCATCTTCCGTGTCTGCATCTGTAG |
| | | nucleotide | GAGACAGAGTCACCATCACTTGTCGGGCGAGTCAGGGTATTACCA |
| | | | CCTGGTTAGCCTGGTATCAGCAGAAACCAGGGAAAGCCCCTAAGC |
| | | | TCCTGATCTTTGGTGCATCTAGTTTGGAAAGTGGGGTCCCATCAAG |
| | | | GTTCAGCGGCAGTGGATCTGGGACAGATTTCACTCTCACCATCAGC |
| | | | AGCCTGCAGCCTGAAGATTTTGCAACTTACTATTGTCAACAGGCTA |
| | | | ACAGTTTCCCGTGGACGTTCGGCCAAGGGACCAAGGTGGAAATCA |
| | | | AACGTACGGTAGCTGCCCCTTCAGTTTTTATCTTTCCGCCGTCTGA |
| | | | CGAGCAGTTAAAATCCGGGACCGCTTCTGTAGTTTGCCTGCTGAAT |
| | | | AATTTTTATCCGCGTGAGGCTAAAGTACAATGGAAAGTCGACAAT |
| | | | GCTTTGCAGTCGGGAAATTCACAGGAAAGTGTTACGGAGCAGGAT |
| | | | TCTAAAGATTCCACATATTCACTCAGCTCCACCCTTACACTGAGCA |
| | | | AAGCCGACTATGAAAAACATAAAGTTTACGCATGTGAGGTGACGC |
| | | | ACCAAGGATTATCCAGTCCGGTCACAAAATCGTTTAACCGCGGTG |
| | | | AGTGT |
| 477 | ATX-P-565 | LC Kappa- | GATATTGTGATGACTCAGTCTCCACTCTCCCTGCCCGTCACCCCTG |
| | | nucleotide | GAGAGCCGGCCTCCATCTCCTGCAGGTCTAGTCAGCGCCTCCTGCA |
| | | | TAGTAGTGGATACAATTATTTGGATTGGTATCTGCAGAAGCCAGG |
| | | | ACAGTCTCCACAGCTCCTGATCTATTTGGGTTCTAGTCGGGCCTCC |
| | | | GGGGTCCCTGACAGGTTCAGTGGCAGTGGATCAGGCACAGATTTT |
| | | | ACACTGAAAATCAGCAGGGTGGAGGCTGAGGATGTTGGGGTTTAT |
| | | | TACTGCATGCAAGGTCTACAAACTCCTCCGACGTTCGGCCAAGGG |
| | | | ACCAAGGTGGAAATCAAACGTACGGTAGCTGCCCCTTCAGTTTTTA |
| | | | TCTTTCCGCCGTCTGACGAGCAGTTAAAATCCGGGACCGCTTCTGT |
| | | | AGTTTGCCTGCTGAATAATTTTTATCCGCGTGAGGCTAAAGTACAA |
| | | | TGGAAAGTCGACAATGCTTTGCAGTCGGGAAATTCACAGGAAAGT |
| | | | GTTACGGAGCAGGATTCTAAAGATTCCACATATTCACTCAGCTCCA |
| | | | CCCTTACACTGAGCAAAGCCGACTATGAAAAACATAAAGTTTACG |
| | | | CATGTGAGGTGACGCACCAAGGATTATCCAGTCCGGTCACAAAAT |
| | | | CGTTTAACCGCGGTGAGTGT |
| 478 | ATX-P-578 | LC Kappa- | GACATCCAGATGACCCAGTCTCCTTCCACCCTGTCTGCATCTGTAG |
| | | nucleotide | GAGACAGAGTCACCATCAGTTGCCGGGCCAGTCAGAGTGTTAATA |
| | | | GCTGGTTGGCCTGGTATCAGCAGAAACCAGGGAAAGCCCCTAAAC |
| | | | TCCTGATCTATAAGGCGTCTAATTTAGAAGGTGGGGTCCCATCAAG |
| | | | TTTCAGCGGCAGTGGATCTGGGACAGAATTCACTCTCACCATCAGC |
| | | | AGCCTGCAGCCTGATGATTTTGCAACTTATTACTGCCAACAATATG |
| | | | ATACTTCTTGGACGTTCGGCCAAGGGACCAAGGTGGAGATCAAAC |
| | | | GTACGGTAGCTGCCCCTTCAGTTTTTATCTTTCCGCCGTCTGACGA |
| | | | GCAGTTAAAATCCGGGACCGCTTCTGTAGTTTGCCTGCTGAATAAT |
| | | | TTTTATCCGCGTGAGGCTAAAGTACAATGGAAAGTCGACAATGCT |
| | | | TTGCAGTCGGGAAATTCACAGGAAAGTGTTACGGAGCAGGATTCT |
| | | | AAAGATTCCACATATTCACTCAGCTCCACCCTTACACTGAGCAAAG |
| | | | CCGACTATGAAAAACATAAAGTTTACGCATGTGAGGTGACGCACC |
| | | | AAGGATTATCCAGTCCGGTCACAAAATCGTTTAACCGCGGTGAGT |
| | | | GT |
| 479 | ATX-P-569 | LC Kappa- | GACATCCAGATGACCCAGTCTCCTTCCACCCTGTCTGCATCTGTAG |
| | | nucleotide | GAGACAGCGTCACCATCACTTGCCGGGCCAGTCAGAATATTATTA |
| | | | CCTGGTTGGCTTGGTATCAGCAGAAACCAGGGAAAGCCCCTAACC |
| | | | TCCTGATCTATAAGGCGTCTAGTTTAGAAAGTGGGGTCCCATCAAG |
| | | | GTTCAGCGGCAGTGGATCTGGGACAGAATTCACTCTCACCATCAG |
| | | | CAGCCTGCAGCCTGATGATTTTGCAACTTATTACTGCCAACAGTAT |
| | | | AGTAGTTATTCGTACACTTTTGGCCAGGGGACCAAGCTGGAGATC |
| | | | AAACGTACGGTAGCTGCCCCTTCAGTTTTTATCTTTCCGCCGTCTG |
| | | | ACGAGCAGTTAAAATCCGGGACCGCTTCTGTAGTTTGCCTGCTGAA |
| | | | TAATTTTTATCCGCGTGAGGCTAAAGTACAATGGAAAGTCGACAA |
| | | | TGCTTTGCAGTCGGGAAATTCACAGGAAAGTGTTACGGAGCAGGA |
| | | | TTCTAAAGATTCCACATATTCACTCAGCTCCACCCTTACACTGAGC |
| | | | AAAGCCGACTATGAAAAACATAAAGTTTACGCATGTGAGGTGACG |
| | | | CACCAAGGATTATCCAGTCCGGTCACAAAATCGTTTAACCGCGGT |
| | | | GAGTGT |
| 480 | ATX-P-576 | LC Kappa- | GACATCCAGATGACCCAGTCTCCATCTTCCGTGTCTGCATCTGTAG |
| | | nucleotide | GAGACAGAGTCACCATCACTTGTCGGACGAGTCAGGGTATTAGAA |
| | | | ACTGGTTAGCCTGGTATCAGCAGAAACCAGGGAAAGCCCCTAAAC |
| | | | TCCTGATCTATGCTGCATCCAGTTTGCAAACTGGGGGCCCATCAAG |
| | | | GTTCAGCGGCAGTGGATCTGGGACAGATTTCACTCTCACCATCAGC |
| | | | AGCCTGCAGCCTGAAGATTTTGCAACTTACTATTGTCAACAGGCTA |
| | | | ACAGTTTCCCGTACACTTTTGGCCAGGGGACCAAGCTGGAGATCA |
| | | | AACGTACGGTAGCTGCCCCTTCAGTTTTTATCTTTCCGCCGTCTGA |
| | | | CGAGCAGTTAAAATCCGGGACCGCTTCTGTAGTTTGCCTGCTGAAT |
| | | | AATTTTTATCCGCGTGAGGCTAAAGTACAATGGAAAGTCGACAAT |
| | | | GCTTTGCAGTCGGGAAATTCACAGGAAAGTGTTACGGAGCAGGAT |
| | | | TCTAAAGATTCCACATATTCACTCAGCTCCACCCTTACACTGAGCA |
| | | | AAGCCGACTATGAAAAACATAAAGTTTACGCATGTGAGGTGACGC |
| | | | ACCAAGGATTATCCAGTCCGGTCACAAAATCGTTTAACCGCGGTG |
| | | | AGTGT |
| 481 | ATX-P-588 | LC Kappa- | GAAATTGTGTTGACGCAGTCTCCAGCCACCCTGTCTGTGTCTCCAG |
| | | nucleotide | GGGAAAGAGCCACCCTCTCCTGCAGGGCCAGTCAGAGTGTTAGCA |
| | | | GCAACTTAGCCTGGTACCAGCAGAAACCTGGCCAGGCTCCCAGGC |
| | | | TCCTCATCTATGGTGCATCCAGCAGGGCCACTGGCATCCCAGACA |
| | | | GGTTCAGTGGCAGTGGGTCTGGGACAGACTTCACTCTCACCATCA |
| | | | GCAGACTGGAGCCTGAAGATTTTGCAGTGTATTACTGTCAGCAGT |
| | | | ATGGTAGCTCATTCACTTTCGGCCCTGGGACCAAAGTGGATATCAA |
| | | | ACGTACGGTAGCTGCCCCTTCAGTTTTTATCTTTCCGCCGTCTGAC |
| | | | GAGCAGTTAAAATCCGGGACCGCTTCTGTAGTTTGCCTGCTGAATA |
| | | | ATTTTTATCCGCGTGAGGCTAAAGTACAATGGAAAGTCGACAATG |
| | | | CTTTGCAGTCGGGAAATTCACAGGAAAGTGTTACGGAGCAGGATT |
| | | | CTAAAGATTCCACATATTCACTCAGCTCCACCCTTACACTGAGCAA |
| | | | AGCCGACTATGAAAAACATAAAGTTTACGCATGTGAGGTGACGCA |
| | | | CCAAGGATTATCCAGTCCGGTCACAAAATCGTTTAACCGCGGTGA |
| | | | GTGT |
| 482 | ATX-P-596 | LC Kappa- | GACATCGTGATGACTCAGTCTCCAGACTCCCTGGCTGTGTCTCTGG |
| | | nucleotide | GCGAGAGGGCCACCATCAACTGCAAGTCCAGCCAGAGTGTTTTAT |
| | | | ACAGCTCCAACAATAAGAACTACTTAGCTTGGTACCAGCAGAAAC |
| | | | CAGGACAGCCTCCTAAGCTGCTCATTTACTGGGCATCTACCCGGGA |
| | | | ATCCGGGGTCCCTGACCGATTCAGTGGCAGCGGGTCTGGGACAGA |
| | | | TTTCACTCTCACCATCAGCAGCCTGCAGGCTGAAGATGTGGCAGTT |
| | | | TATTACTGTCAGCAGTATGGTAGCTCACCCATGTACACTTTTGGCC |
| | | | AGGGGACCAAGCTGGAGATCAAACGTACGGTAGCTGCCCCTTCAG |
| | | | TTTTTATCTTTCCGCCGTCTGACGAGCAGTTAAAATCCGGGACCGC |
| | | | TTCTGTAGTTTGCCTGCTGAATAATTTTTATCCGCGTGAGGCTAAA |
| | | | GTACAATGGAAAGTCGACAATGCTTTGCAGTCGGGAAATTCACAG |
| | | | GAAAGTGTTACGGAGCAGGATTCTAAAGATTCCACATATTCACTC |
| | | | AGCTCCACCCTTACACTGAGCAAAGCCGACTATGAAAAACATAAA |
| | | | GTTTACGCATGTGAGGTGACGCACCAAGGATTATCCAGTCCGGTC |
| | | | ACAAAATCGTTTAACCGCGGTGAGTGT |
| 483 | ATX-P-600 | LC Kappa- | GAAATTGTGTTGACGCAGTCTCCAGGCACCCTGTCTTTGTCTCCAG |
| | | nucleotide | GGGAAAGAGCCACCCTCTCCTGCAGGGCCAGTCAGAATGTTAGGG |
| | | | GCAGCTACTTAGCCTGGTACCAGCAGAAACCTGGCCAGGCTCCCA |
| | | | GGCTCCTCATATATGGTGCATCCAACAGGGCCACTGACATCCCAG |
| | | | ACAGGTTCAGTGGCAGTGGGTCTGGGACAGACTTCACTCTCACCA |
| | | | TCAGCGGCCTGGAGCCTGAAGATTTTGTAGTGTATTACTGTCAGCA |
| | | | GTATGGTAGTTCGTACACTTTTGGCCAGGGGACCAAGGTGGAGAT |
| | | | CAAACGTACGGTAGCTGCCCCTTCAGTTTTTATCTTTCCGCCGTCT |
| | | | GACGAGCAGTTAAAATCCGGGACCGCTTCTGTAGTTTGCCTGCTGA |
| | | | ATAATTTTTATCCGCGTGAGGCTAAAGTACAATGGAAAGTCGACA |
| | | | ATGCTTTGCAGTCGGGAAATTCACAGGAAAGTGTTACGGAGCAGG |
| | | | ATTCTAAAGATTCCACATATTCACTCAGCTCCACCCTTACACTGAG |
| | | | CAAAGCCGACTATGAAAAACATAAAGTTTACGCATGTGAGGTGAC |
| | | | GCACCAAGGATTATCCAGTCCGGTCACAAAATCGTTTAACCGCGG |
| | | | TGAGTGT |
| 484 | ATX-P-571 | HC IgG1 Fc | QVQLQESGPGLVKPSGTLSLTCAVSGGSISSRNWWSWVRQPPGKGLE |
| | | | WIGEIYHGGTTNYNPSLKSRVTISVDKSKNQFSLKLSSVTAADTAVYY |
| | | | CARGGLRLGELSPNAFDIWGQGTMVTVSSASTKGPSVFPLAPSSKSTS |
| | | | GGTAALGCLVKDYFPEPVTVSWNSGALTSGVHTFPAVLQSSGLYSLS |
| | | | SVVTVPSSSLGTQTYICNVNHKPSNTKVDKRVEPKSCDKTHTCPPCPA |
| | | | PELLGGPSVFLFPPKPKDTLMISRTPEVTCVVVDVSHEDPEVKFNWYV |
| | | | DGVEVHNAKTKPREEQYASTYRVVSVLTVLHQDWLNGKEYKCKVS |
| | | | NKALPAPIEKTISKAKGQPREPQVYTLPPSREEMTKNQVSLTCLVKGF |
| | | | YPSDIAVEWESNGQPENNYKTTPPVLDSDGSFFLYSKLTVDKSRWQQ |
| | | | GNVFSCSVMHEALHNHYTQKSLSLSPG |
| 485 | ATX-P-577 | HC IgG1 Fc | QVQLQESGPGLVKPSGTLSLTCAVSGGSISSSNWWTWVRQPPGKGLE |
| | | | WIGETYHDGSTNYNPSLKSRVTISVDKSKNQFSLKLSSVTAADTAVY |
| | | | YCLEFYFDYWGQGTLVTVSSASTKGPSVFPLAPSSKSTSGGTAALGCL |
| | | | VKDYFPEPVTVSWNSGALTSGVHTFPAVLQSSGLYSLSSVVTVPSSSL |
| | | | GTQTYICNVNHKPSNTKVDKRVEPKSCDKTHTCPPCPAPELLGGPSVF |
| | | | LFPPKPKDTLMISRTPEVTCVVVDVSHEDPEVKFNWYVDGVEVHNA |
| | | | KTKPREEQYASTYRVVSVLTVLHQDWLNGKEYKCKVSNKALPAPIE |
| | | | KTISKAKGQPREPQVYTLPPSREEMTKNQVSLTCLVKGFYPSDIAVEW |
| | | | ESNGQPENNYKTTPPVLDSDGSFFLYSKLTVDKSRWQQGNVFSCSVM |
| | | | HEALHNHYTQKSLSLSPG |
| 486 | ATX-P-579 | HC IgG1 Fc | QVQLQESGPGLVKPSGTLSLTCAVSGASISTSNWWTWVRQPPGKGLE |
| | | | WIGEIYHDGSTNYSPSLQSRVTISVDKSKNQFSLTLTSVTAADTAIYYC |
| | | | GDFYIDVWGNGTTVTVSSASTKGPSVFPLAPSSKSTSGGTAALGCLVK |
| | | | DYFPEPVTVSWNSGALTSGVHTFPAVLQSSGLYSLSSVVTVPSSSLGT |
| | | | QTYICNVNHKPSNTKVDKRVEPKSCDKTHTCPPCPAPELLGGPSVFLF |
| | | | PPKPKDTLMISRTPEVTCVVVDVSHEDPEVKFNWYVDGVEVHNAKT |
| | | | KPREEQYASTYRVVSVLTVLHQDWLNGKEYKCKVSNKALPAPIEKTI |
| | | | SKAKGQPREPQVYTLPPSREEMTKNQVSLTCLVKGFYPSDIAVEWES |
| | | | NGQPENNYKTTPPVLDSDGSFFLYSKLTVDKSRWQQGNVFSCSVMH |
| | | | EALHNHYTQKSLSLSPG |
| 487 | ATX-P-580 | HC IgG1 Fc | QVQLQESGPGLVKPSGTLSLTCAVSGGSISTSDWWTWVRQPPGKGLE |
| | | | WIGEIYHSGSTNYNPSLKSRVTISVDKSKNQFSLKLSSVTAADTAVYY |
| | | | CADWYFDLWGRGTLVTVSSASTKGPSVFPLAPSSKSTSGGTAALGCL |
| | | | VKDYFPEPVTVSWNSGALTSGVHTFPAVLQSSGLYSLSSVVTVPSSSL |
| | | | GTQTYICNVNHKPSNTKVDKRVEPKSCDKTHTCPPCPAPELLGGPSVF |
| | | | LFPPKPKDTLMISRTPEVTCVVVDVSHEDPEVKFNWYVDGVEVHNA |
| | | | KTKPREEQYASTYRVVSVLTVLHQDWLNGKEYKCKVSNKALPAPIE |
| | | | KTISKAKGQPREPQVYTLPPSREEMTKNQVSLTCLVKGFYPSDIAVEW |
| | | | ESNGQPENNYKTTPPVLDSDGSFFLYSKLTVDKSRWQQGNVFSCSVM |
| | | | HEALHNHYTQKSLSLSPG |
| 488 | ATX-P-582 | HC IgG1 Fc | QVQLQESGPGLVKPSGTLSLTCAVSGGSISISKWWSWVRQPPGKGLE |
| | | | WIGEIYHTGSTNYHPSLKSRVTISVDKSKNQFYLKLNSVTAADTAVY |
| | | | YCARDELRLGELSPSLDIWGQGTMVTVSSASTKGPSVFPLAPSSKSTS |
| | | | GGTAALGCLVKDYFPEPVTVSWNSGALTSGVHTFPAVLQSSGLYSLS |
| | | | SVVTVPSSSLGTQTYICNVNHKPSNTKVDKRVEPKSCDKTHTCPPCPA |
| | | | PELLGGPSVFLFPPKPKDTLMISRTPEVTCVVVDVSHEDPEVKFNWYV |
| | | | DGVEVHNAKTKPREEQYASTYRVVSVLTVLHQDWLNGKEYKCKVS |
| | | | NKALPAPIEKTISKAKGQPREPQVYTLPPSREEMTKNQVSLTCLVKGF |
| | | | YPSDIAVEWESNGQPENNYKTTPPVLDSDGSFFLYSKLTVDKSRWQQ |
| | | | GNVFSCSVMHEALHNHYTQKSLSLSPG |
| 489 | ATX-P-598 | HC IgG1 Fc | QVQLQESGPGLVKPSGTLSLTCAVSGGSISSSNWWSWVRQSPGKGLE |
| | | | WIGEIYHSGTTNYNPSLKSRVTISVDKSKNQFSLKLSSATAADTAVYY |
| | | | CARDRLRLGESSSDVFDIWGQGTMVTVSSASTKGPSVFPLAPSSKSTS |
| | | | GGTAALGCLVKDYFPEPVTVSWNSGALTSGVHTFPAVLQSSGLYSLS |
| | | | SVVTVPSSSLGTQTYICNVNHKPSNTKVDKRVEPKSCDKTHTCPPCPA |
| | | | PELLGGPSVFLFPPKPKDTLMISRTPEVTCVVVDVSHEDPEVKFNWYV |
| | | | DGVEVHNAKTKPREEQYASTYRVVSVLTVLHQDWLNGKEYKCKVS |
| | | | NKALPAPIEKTISKAKGQPREPQVYTLPPSREEMTKNQVSLTCLVKGF |
| | | | YPSDIAVEWESNGQPENNYKTTPPVLDSDGSFFLYSKLTVDKSRWQQ |
| | | | GNVFSCSVMHEALHNHYTQKSLSLSPG |
| 490 | ATX-P-603 | HC IgG1 Fc | QVQLQESGPGLVKPSGTLSLTCAVSGGSISGSHWWSWFRQPPGKGLE |
| | | | WIGEIYHTGSTNKNPSLKSRVTISLDKSKNQFSLRLRSVTDADTAVYY |
| | | | CARDQYTGSPRDAFDIWGQGTMVTVSSASTKGPSVFPLAPSSKSTSG |
| | | | GTAALGCLVKDYFPEPVTVSWNSGALTSGVHTFPAVLQSSGLYSLSS |
| | | | VVTVPSSSLGTQTYICNVNHKPSNTKVDKRVEPKSCDKTHTCPPCPAP |
| | | | ELLGGPSVFLFPPKPKDTLMISRTPEVTCVVVDVSHEDPEVKFNWYV |
| | | | DGVEVHNAKTKPREEQYASTYRVVSVLTVLHQDWLNGKEYKCKVS |
| | | | NKALPAPIEKTISKAKGQPREPQVYTLPPSREEMTKNQVSLTCLVKGF |
| | | | YPSDIAVEWESNGQPENNYKTTPPVLDSDGSFFLYSKLTVDKSRWQQ |
| | | | GNVFSCSVMHEALHNHYTQKSLSLSPG |
| 491 | ATX-P-608 | HC IgG1 Fc | QVQLQESGPGLVKPSGTLSLTCAVSGGSISSSNWWSWVRQSPGKGLE |
| | | | WIGEIYHTGSTNKKPSLKSRVIISVDKSKNQFSLKLISVNAADTAIYYC |
| | | | ARDREGGTTEAFDIWGQGTMVTVSSASTKGPSVFPLAPSSKSTSGGTA |
| | | | ALGCLVKDYFPEPVTVSWNSGALTSGVHTFPAVLQSSGLYSLSSVVT |
| | | | VPSSSLGTQTYICNVNHKPSNTKVDKRVEPKSCDKTHTCPPCPAPELL |
| | | | GGPSVFLFPPKPKDTLMISRTPEVTCVVVDVSHEDPEVKFNWYVDGV |
| | | | EVHNAKTKPREEQYASTYRVVSVLTVLHQDWLNGKEYKCKVSNKA |
| | | | LPAPIEKTISKAKGQPREPQVYTLPPSREEMTKNQVSLTCLVKGFYPSD |
| | | | IAVEWESNGQPENNYKTTPPVLDSDGSFFLYSKLTVDKSRWQQGNVF |
| | | | SCSVMHEALHNHYTQKSLSLSPG |
| 492 | ATX-P-609 | HC IgG1 Fc | QVQLQESGPGLVKPSGTLSLTCAVSGGSISSSNWWSWVRQPPGKGLE |
| | | | WIGEIYHSGSTNYNPSLKSRVTISVDKSKNQFSLKLRSVTAADTAVYY |
| | | | CARDQLSSGPTDAFDIWGQGTMVTVSSASTKGPSVFPLAPSSKSTSGG |
| | | | TAALGCLVKDYFPEPVTVSWNSGALTSGVHTFPAVLQSSGLYSLSSV |
| | | | VTVPSSSLGTQTYICNVNHKPSNTKVDKRVEPKSCDKTHTCPPCPAPE |
| | | | LLGGPSVFLFPPKPKDTLMISRTPEVTCVVVDVSHEDPEVKFNWYVD |
| | | | GVEVHNAKTKPREEQYASTYRVVSVLTVLHQDWLNGKEYKCKVSN |
| | | | KALPAPIEKTISKAKGQPREPQVYTLPPSREEMTKNQVSLTCLVKGFY |
| | | | PSDIAVEWESNGQPENNYKTTPPVLDSDGSFFLYSKLTVDKSRWQQG |
| | | | NVFSCSVMHEALHNHYTQKSLSLSPG |
| 493 | ATX-P-563 | HC IgG1 Fc | QVQLQESGPGLMKPSETLSLTCTVSGGSISSHYWSWIRQPPGKGLEWI |
| | | | GYIFYSGNINYNPSLKSRVTISVDTSKNQFSLKLRSVTTADTAVYYCA |
| | | | RDRGGSYSYHFDCWGQGTLVTVSSASTKGPSVFPLAPSSKSTSGGTA |
| | | | ALGCLVKDYFPEPVTVSWNSGALTSGVHTFPAVLQSSGLYSLSSVVT |
| | | | VPSSSLGTQTYICNVNHKPSNTKVDKRVEPKSCDKTHTCPPCPAPELL |
| | | | GGPSVFLFPPKPKDTLMISRTPEVTCVVVDVSHEDPEVKFNWYVDGV |
| | | | EVHNAKTKPREEQYASTYRVVSVLTVLHQDWLNGKEYKCKVSNKA |
| | | | LPAPIEKTISKAKGQPREPQVYTLPPSREEMTKNQVSLTCLVKGFYPSD |
| | | | IAVEWESNGQPENNYKTTPPVLDSDGSFFLYSKLTVDKSRWQQGNVF |
| | | | SCSVMHEALHNHYTQKSLSLSPG |
| 494 | ATX-P-570 | HC IgG1 Fc | QVQLQESGPGLVKPSETMSLTCTVSGGSFTGYYWSWIRQPPGKGLEW |
| | | | IGYVHYSGGTKSNPSLKSRVTISVDTSKNQFSLKLSSVTAADTAVYYC |
| | | | ARERYEWNSYFDYWGQGTLVTVSSASTKGPSVFPLAPSSKSTSGGTA |
| | | | ALGCLVKDYFPEPVTVSWNSGALTSGVHTFPAVLQSSGLYSLSSVVT |
| | | | VPSSSLGTQTYICNVNHKPSNTKVDKRVEPKSCDKTHTCPPCPAPELL |
| | | | GGPSVFLFPPKPKDTLMISRTPEVTCVVVDVSHEDPEVKFNWYVDGV |
| | | | EVHNAKTKPREEQYASTYRVVSVLTVLHQDWLNGKEYKCKVSNKA |
| | | | LPAPIEKTISKAKGQPREPQVYTLPPSREEMTKNQVSLTCLVKGFYPSD |
| | | | IAVEWESNGQPENNYKTTPPVLDSDGSFFLYSKLTVDKSRWQQGNVF |
| | | | SCSVMHEALHNHYTQKSLSLSPG |
| 495 | ATX-P-571 | HC IgG1 Fc- | CAGGTGCAGCTGCAGGAGTCGGGCCCAGGACTGGTGAAGCCTTCG |
| | | nucleotide | GGGACCCTGTCCCTCACCTGTGCTGTCTCGGGTGGCTCCATCAGTA |
| | | | GTCGTAACTGGTGGAGTTGGGTCCGCCAGCCCCCAGGGAAGGGGC |
| | | | TGGAGTGGATTGGGGAAATCTATCATGGTGGGACCACCAACTACA |
| | | | ACCCGTCCCTTAAGAGTCGAGTCACCATATCAGTAGACAAGTCCA |
| | | | AGAACCAATTCTCCCTGAAGCTGAGTTCTGTGACCGCCGCGGACA |
| | | | CGGCCGTGTATTACTGTGCGAGAGGGGGATTACGTTTGGGGGAGT |
| | | | TATCGCCTAATGCTTTTGATATCTGGGGACAAGGGACAATGGTCAC |
| | | | CGTCTCTTCAGCTAGCACTAAAGGGCCTTCTGTATTTCCCTTGGCC |
| | | | CCGTCCAGCAAATCGACCTCGGGAGGGACAGCCGCCCTGGGTTGC |
| | | | CTTGTGAAAGATTATTTCCCTGAGCCAGTTACCGTAAGTTGGAACA |
| | | | GTGGGGCGCTGACAAGTGGTGTGCACACGTTTCCTGCCGTCCTGCA |
| | | | ATCATCGGGCTTGTATAGCCTCAGCTCTGTGGTCACTGTCCCAAGT |
| | | | TCATCGCTGGGCACTCAGACGTATATTTGCAATGTGAACCACAAA |
| | | | CCTTCAAATACAAAAGTGGATAAACGCGTAGAACCGAAATCGTGT |
| | | | GATAAAACTCACACATGCCCGCCATGCCCGGCACCTGAACTGCTT |
| | | | GGTGGTCCCAGCGTGTTCCTGTTCCCGCCGAAGCCTAAAGATACTC |
| | | | TAATGATCAGCCGTACGCCAGAGGTGACATGTGTCGTGGTTGACG |
| | | | TGTCCCACGAAGATCCCGAAGTTAAGTTCAATTGGTATGTTGATGG |
| | | | TGTAGAGGTACACAATGCTAAGACTAAACCTCGCGAGGAGCAGTA |
| | | | CGCCTCGACCTATCGTGTCGTGAGCGTTCTGACCGTCCTTCACCAA |
| | | | GATTGGCTTAACGGCAAAGAATATAAGTGCAAGGTAAGCAATAAA |
| | | | GCACTTCCGGCCCCAATCGAGAAAACCATTTCCAAGGCCAAAGGT |
| | | | CAACCAAGAGAACCCCAGGTGTATACTCTTCCGCCTTCTCGTGAGG |
| | | | AAATGACTAAAAATCAAGTATCCCTTACGTGTCTGGTTAAAGGTTT |
| | | | TTATCCTAGCGATATTGCTGTTGAATGGGAATCGAACGGTCAGCCG |
| | | | GAGAATAATTATAAAACAACGCCACCCGTCCTGGATAGCGACGGC |
| | | | TCATTTTTTCTGTATAGCAAACTGACTGTAGATAAATCACGGTGGC |
| | | | AGCAGGGCAATGTATTCAGTTGCTCCGTTATGCATGAAGCGTTACA |
| | | | TAATCACTACACGCAGAAATCTCTTAGTCTTTCACCCGGT |
| 496 | ATX-P-577 | HC IgG1 Fc- | CAGGTGCAGCTGCAGGAGTCGGGCCCAGGACTGGTGAAGCCTTCG |
| | | nucleotide | GGGACCCTGTCCCTCACCTGCGCTGTCTCTGGTGGCTCCATCAGCA |
| | | | GTAGTAACTGGTGGACTTGGGTCCGCCAGCCCCCAGGGAAGGGGC |
| | | | TGGAGTGGATTGGGGAAACCTATCATGATGGGAGCACCAACTACA |
| | | | ACCCGTCCCTCAAGAGTCGAGTCACCATTTCAGTAGACAAGTCCA |
| | | | AGAACCAATTCTCCCTGAAACTGAGTTCTGTGACCGCCGCGGACA |
| | | | CGGCCGTGTATTACTGTTTGGAATTCTACTTTGACTACTGGGGCCA |
| | | | GGGAACCCTGGTCACCGTCTCCTCAGCTAGCACTAAAGGGCCTTCT |
| | | | GTATTTCCCTTGGCCCCGTCCAGCAAATCGACCTCGGGAGGGACA |
| | | | GCCGCCCTGGGTTGCCTTGTGAAAGATTATTTCCCTGAGCCAGTTA |
| | | | CCGTAAGTTGGAACAGTGGGGCGCTGACAAGTGGTGTGCACACGT |
| | | | TTCCTGCCGTCCTGCAATCATCGGGCTTGTATAGCCTCAGCTCTGT |
| | | | GGTCACTGTCCCAAGTTCATCGCTGGGCACTCAGACGTATATTTGC |
| | | | AATGTGAACCACAAACCTTCAAATACAAAAGTGGATAAACGCGTA |
| | | | GAACCGAAATCGTGTGATAAAACTCACACATGCCCGCCATGCCCG |
| | | | GCACCTGAACTGCTTGGTGGTCCCAGCGTGTTCCTGTTCCCGCCGA |
| | | | AGCCTAAAGATACTCTAATGATCAGCCGTACGCCAGAGGTGACAT |
| | | | GTGTCGTGGTTGACGTGTCCCACGAAGATCCCGAAGTTAAGTTCA |
| | | | ATTGGTATGTTGATGGTGTAGAGGTACACAATGCTAAGACTAAAC |
| | | | CTCGCGAGGAGCAGTACGCCTCGACCTATCGTGTCGTGAGCGTTCT |
| | | | GACCGTCCTTCACCAAGATTGGCTTAACGGCAAAGAATATAAGTG |
| | | | CAAGGTAAGCAATAAAGCACTTCCGGCCCCAATCGAGAAAACCAT |
| | | | TTCCAAGGCCAAAGGTCAACCAAGAGAACCCCAGGTGTATACTCT |
| | | | TCCGCCTTCTCGTGAGGAAATGACTAAAAATCAAGTATCCCTTACG |
| | | | TGTCTGGTTAAAGGTTTTTATCCTAGCGATATTGCTGTTGAATGGG |
| | | | AATCGAACGGTCAGCCGGAGAATAATTATAAAACAACGCCACCCG |
| | | | TCCTGGATAGCGACGGCTCATTTTTTCTGTATAGCAAACTGACTGT |
| | | | AGATAAATCACGGTGGCAGCAGGGCAATGTATTCAGTTGCTCCGT |
| | | | TATGCATGAAGCGTTACATAATCACTACACGCAGAAATCTCTTAGT |
| | | | CTTTCACCCGGT |
| 497 | ATX-P-579 | HC IgG1 Fc- | CAGGTGCAGCTGCAGGAGTCGGGCCCAGGACTGGTGAAGCCTTCG |
| | | nucleotide | GGGACCCTGTCCCTCACCTGCGCTGTGTCTGGTGCCTCCATCAGCA |
| | | | CAAGTAATTGGTGGACTTGGGTCCGCCAGCCCCCAGGGAAGGGGC |
| | | | TGGAGTGGATTGGTGAAATCTATCATGATGGGAGCACCAACTACA |
| | | | GCCCGTCCCTCCAGAGTCGAGTCACCATATCAGTAGACAAGTCCA |
| | | | AGAACCAGTTCTCCCTGACGCTGACCTCTGTGACCGCCGCGGACA |
| | | | CGGCCATTTATTATTGTGGTGACTTCTACATAGACGTCTGGGGCAA |
| | | | CGGGACCACGGTCACCGTCTCCTCAGCTAGCACTAAAGGGCCTTCT |
| | | | GTATTTCCCTTGGCCCCGTCCAGCAAATCGACCTCGGGAGGGACA |
| | | | GCCGCCCTGGGTTGCCTTGTGAAAGATTATTTCCCTGAGCCAGTTA |
| | | | CCGTAAGTTGGAACAGTGGGGCGCTGACAAGTGGTGTGCACACGT |
| | | | TTCCTGCCGTCCTGCAATCATCGGGCTTGTATAGCCTCAGCTCTGT |
| | | | GGTCACTGTCCCAAGTTCATCGCTGGGCACTCAGACGTATATTTGC |
| | | | AATGTGAACCACAAACCTTCAAATACAAAAGTGGATAAACGCGTA |
| | | | GAACCGAAATCGTGTGATAAAACTCACACATGCCCGCCATGCCCG |
| | | | GCACCTGAACTGCTTGGTGGTCCCAGCGTGTTCCTGTTCCCGCCGA |
| | | | AGCCTAAAGATACTCTAATGATCAGCCGTACGCCAGAGGTGACAT |
| | | | GTGTCGTGGTTGACGTGTCCCACGAAGATCCCGAAGTTAAGTTCA |
| | | | ATTGGTATGTTGATGGTGTAGAGGTACACAATGCTAAGACTAAAC |
| | | | CTCGCGAGGAGCAGTACGCCTCGACCTATCGTGTCGTGAGCGTTCT |
| | | | GACCGTCCTTCACCAAGATTGGCTTAACGGCAAAGAATATAAGTG |
| | | | CAAGGTAAGCAATAAAGCACTTCCGGCCCCAATCGAGAAAACCAT |
| | | | TTCCAAGGCCAAAGGTCAACCAAGAGAACCCCAGGTGTATACTCT |
| | | | TCCGCCTTCTCGTGAGGAAATGACTAAAAATCAAGTATCCCTTACG |
| | | | TGTCTGGTTAAAGGTTTTTATCCTAGCGATATTGCTGTTGAATGGG |
| | | | AATCGAACGGTCAGCCGGAGAATAATTATAAAACAACGCCACCCG |
| | | | TCCTGGATAGCGACGGCTCATTTTTTCTGTATAGCAAACTGACTGT |
| | | | AGATAAATCACGGTGGCAGCAGGGCAATGTATTCAGTTGCTCCGT |
| | | | TATGCATGAAGCGTTACATAATCACTACACGCAGAAATCTCTTAGT |
| | | | CTTTCACCCGGT |
| 498 | ATX-P-580 | HC IgG1 Fc- | CAGGTGCAGCTGCAGGAGTCGGGCCCAGGACTGGTGAAGCCTTCG |
| | | nucleotide | GGGACCCTGTCCCTCACCTGCGCTGTCTCTGGTGGCTCCATCAGCA |
| | | | CTAGTGACTGGTGGACTTGGGTCCGCCAGCCCCCAGGGAAGGGGC |
| | | | TGGAGTGGATTGGGGAAATCTATCATAGTGGGAGCACCAACTACA |
| | | | ACCCGTCCCTCAAGAGTCGAGTCACCATATCAGTAGACAAATCCA |
| | | | AGAACCAGTTCTCCCTGAAGCTGAGCTCTGTGACCGCCGCGGACA |
| | | | CGGCCGTGTATTACTGTGCGGACTGGTACTTCGATCTCTGGGGCCG |
| | | | TGGCACCCTGGTCACTGTCTCCTCAGCTAGCACTAAAGGGCCTTCT |
| | | | GTATTTCCCTTGGCCCCGTCCAGCAAATCGACCTCGGGAGGGACA |
| | | | GCCGCCCTGGGTTGCCTTGTGAAAGATTATTTCCCTGAGCCAGTTA |
| | | | CCGTAAGTTGGAACAGTGGGGCGCTGACAAGTGGTGTGCACACGT |
| | | | TTCCTGCCGTCCTGCAATCATCGGGCTTGTATAGCCTCAGCTCTGT |
| | | | GGTCACTGTCCCAAGTTCATCGCTGGGCACTCAGACGTATATTTGC |
| | | | AATGTGAACCACAAACCTTCAAATACAAAAGTGGATAAACGCGTA |
| | | | GAACCGAAATCGTGTGATAAAACTCACACATGCCCGCCATGCCCG |
| | | | GCACCTGAACTGCTTGGTGGTCCCAGCGTGTTCCTGTTCCCGCCGA |
| | | | AGCCTAAAGATACTCTAATGATCAGCCGTACGCCAGAGGTGACAT |
| | | | GTGTCGTGGTTGACGTGTCCCACGAAGATCCCGAAGTTAAGTTCA |
| | | | ATTGGTATGTTGATGGTGTAGAGGTACACAATGCTAAGACTAAAC |
| | | | CTCGCGAGGAGCAGTACGCCTCGACCTATCGTGTCGTGAGCGTTCT |
| | | | GACCGTCCTTCACCAAGATTGGCTTAACGGCAAAGAATATAAGTG |
| | | | CAAGGTAAGCAATAAAGCACTTCCGGCCCCAATCGAGAAAACCAT |
| | | | TTCCAAGGCCAAAGGTCAACCAAGAGAACCCCAGGTGTATACTCT |
| | | | TCCGCCTTCTCGTGAGGAAATGACTAAAAATCAAGTATCCCTTACG |
| | | | TGTCTGGTTAAAGGTTTTTATCCTAGCGATATTGCTGTTGAATGGG |
| | | | AATCGAACGGTCAGCCGGAGAATAATTATAAAACAACGCCACCCG |
| | | | TCCTGGATAGCGACGGCTCATTTTTTCTGTATAGCAAACTGACTGT |
| | | | AGATAAATCACGGTGGCAGCAGGGCAATGTATTCAGTTGCTCCGT |
| | | | TATGCATGAAGCGTTACATAATCACTACACGCAGAAATCTCTTAGT |
| | | | CTTTCACCCGGT |
| 499 | ATX-P-582 | HC IgG1 Fc- | CAGGTGCAGCTGCAGGAGTCGGGCCCAGGACTGGTGAAGCCTTCG |
| | | nucleotide | GGGACCCTGTCCCTCACCTGCGCTGTGTCTGGTGGCTCCATCAGCA |
| | | | TTAGTAAATGGTGGAGTTGGGTCCGCCAGCCCCCAGGGAAGGGAC |
| | | | TGGAGTGGATTGGGGAAATCTATCATACTGGGAGCACCAACTACC |
| | | | ACCCGTCCCTCAAGAGCCGAGTCACCATATCAGTAGACAAGTCCA |
| | | | AGAACCAATTCTACCTGAAGCTGAACTCTGTGACCGCCGCGGACA |
| | | | CGGCCGTATATTACTGTGCGAGAGATGAATTACGGTTGGGGGAGT |
| | | | TATCGCCCTCTCTTGATATCTGGGGACAAGGGACAATGGTCACCGT |
| | | | CTCTTCAGCTAGCACTAAAGGGCCTTCTGTATTTCCCTTGGCCCCG |
| | | | TCCAGCAAATCGACCTCGGGAGGGACAGCCGCCCTGGGTTGCCTT |
| | | | GTGAAAGATTATTTCCCTGAGCCAGTTACCGTAAGTTGGAACAGT |
| | | | GGGGCGCTGACAAGTGGTGTGCACACGTTTCCTGCCGTCCTGCAAT |
| | | | CATCGGGCTTGTATAGCCTCAGCTCTGTGGTCACTGTCCCAAGTTC |
| | | | ATCGCTGGGCACTCAGACGTATATTTGCAATGTGAACCACAAACC |
| | | | TTCAAATACAAAAGTGGATAAACGCGTAGAACCGAAATCGTGTGA |
| | | | TAAAACTCACACATGCCCGCCATGCCCGGCACCTGAACTGCTTGGT |
| | | | GGTCCCAGCGTGTTCCTGTTCCCGCCGAAGCCTAAAGATACTCTAA |
| | | | TGATCAGCCGTACGCCAGAGGTGACATGTGTCGTGGTTGACGTGT |
| | | | CCCACGAAGATCCCGAAGTTAAGTTCAATTGGTATGTTGATGGTGT |
| | | | AGAGGTACACAATGCTAAGACTAAACCTCGCGAGGAGCAGTACGC |
| | | | CTCGACCTATCGTGTCGTGAGCGTTCTGACCGTCCTTCACCAAGAT |
| | | | TGGCTTAACGGCAAAGAATATAAGTGCAAGGTAAGCAATAAAGCA |
| | | | CTTCCGGCCCCAATCGAGAAAACCATTTCCAAGGCCAAAGGTCAA |
| | | | CCAAGAGAACCCCAGGTGTATACTCTTCCGCCTTCTCGTGAGGAA |
| | | | ATGACTAAAAATCAAGTATCCCTTACGTGTCTGGTTAAAGGTTTTT |
| | | | ATCCTAGCGATATTGCTGTTGAATGGGAATCGAACGGTCAGCCGG |
| | | | AGAATAATTATAAAACAACGCCACCCGTCCTGGATAGCGACGGCT |
| | | | CATTTTTTCTGTATAGCAAACTGACTGTAGATAAATCACGGTGGCA |
| | | | GCAGGGCAATGTATTCAGTTGCTCCGTTATGCATGAAGCGTTACAT |
| | | | AATCACTACACGCAGAAATCTCTTAGTCTTTCACCCGGT |
| 500 | ATX-P-598 | HC IgG1 Fc- | CAGGTGCAGCTGCAGGAGTCGGGCCCAGGACTGGTGAAGCCTTCG |
| | | nucleotide | GGGACCCTGTCCCTCACCTGCGCTGTCTCTGGTGGCTCCATCAGCA |
| | | | GTAGTAACTGGTGGAGTTGGGTCCGCCAGTCCCCAGGGAAGGGGC |
| | | | TGGAATGGATTGGGGAAATCTATCATAGTGGGACCACCAACTACA |
| | | | ACCCGTCCCTCAAGAGTCGAGTCACCATATCAGTAGACAAGTCCA |
| | | | AGAACCAGTTCTCCCTGAAGCTGAGCTCTGCGACCGCCGCGGACA |
| | | | CGGCCGTGTATTATTGTGCGAGAGATAGATTACGTTTGGGGGAGT |
| | | | CATCGTCCGATGTTTTTGATATCTGGGGACAAGGGACAATGGTCAC |
| | | | CGTCTCTTCAGCTAGCACTAAAGGGCCTTCTGTATTTCCCTTGGCC |
| | | | CCGTCCAGCAAATCGACCTCGGGAGGGACAGCCGCCCTGGGTTGC |
| | | | CTTGTGAAAGATTATTTCCCTGAGCCAGTTACCGTAAGTTGGAACA |
| | | | GTGGGGCGCTGACAAGTGGTGTGCACACGTTTCCTGCCGTCCTGCA |
| | | | ATCATCGGGCTTGTATAGCCTCAGCTCTGTGGTCACTGTCCCAAGT |
| | | | TCATCGCTGGGCACTCAGACGTATATTTGCAATGTGAACCACAAA |
| | | | CCTTCAAATACAAAAGTGGATAAACGCGTAGAACCGAAATCGTGT |
| | | | GATAAAACTCACACATGCCCGCCATGCCCGGCACCTGAACTGCTT |
| | | | GGTGGTCCCAGCGTGTTCCTGTTCCCGCCGAAGCCTAAAGATACTC |
| | | | TAATGATCAGCCGTACGCCAGAGGTGACATGTGTCGTGGTTGACG |
| | | | TGTCCCACGAAGATCCCGAAGTTAAGTTCAATTGGTATGTTGATGG |
| | | | TGTAGAGGTACACAATGCTAAGACTAAACCTCGCGAGGAGCAGTA |
| | | | CGCCTCGACCTATCGTGTCGTGAGCGTTCTGACCGTCCTTCACCAA |
| | | | GATTGGCTTAACGGCAAAGAATATAAGTGCAAGGTAAGCAATAAA |
| | | | GCACTTCCGGCCCCAATCGAGAAAACCATTTCCAAGGCCAAAGGT |
| | | | CAACCAAGAGAACCCCAGGTGTATACTCTTCCGCCTTCTCGTGAGG |
| | | | AAATGACTAAAAATCAAGTATCCCTTACGTGTCTGGTTAAAGGTTT |
| | | | TTATCCTAGCGATATTGCTGTTGAATGGGAATCGAACGGTCAGCCG |
| | | | GAGAATAATTATAAAACAACGCCACCCGTCCTGGATAGCGACGGC |
| | | | TCATTTTTTCTGTATAGCAAACTGACTGTAGATAAATCACGGTGGC |
| | | | AGCAGGGCAATGTATTCAGTTGCTCCGTTATGCATGAAGCGTTACA |
| | | | TAATCACTACACGCAGAAATCTCTTAGTCTTTCACCCGGT |
| 501 | ATX-P-603 | HC IgG1 Fc- | CAGGTGCAGCTGCAGGAGTCGGGCCCAGGACTGGTGAAGCCTTCG |
| | | nucleotide | GGGACCCTGTCCCTCACCTGCGCTGTCTCTGGTGGCTCCATCAGCG |
| | | | GTAGTCACTGGTGGAGTTGGTTCCGCCAGCCCCCAGGAAAGGGGC |
| | | | TGGAGTGGATTGGGGAAATCTATCATACTGGGAGCACCAACAAAA |
| | | | ACCCGTCCCTCAAGAGTCGAGTCACTATCTCATTAGACAAGTCCAA |
| | | | GAATCAGTTCTCCCTGAGGCTGAGGTCTGTGACCGACGCGGACAC |
| | | | GGCCGTGTATTACTGTGCGAGAGATCAGTATACTGGGAGCCCAAG |
| | | | GGATGCTTTTGATATCTGGGGACAAGGGACAATGGTCACCGTCTC |
| | | | CTCAGCTAGCACTAAAGGGCCTTCTGTATTTCCCTTGGCCCCGTCC |
| | | | AGCAAATCGACCTCGGGAGGGACAGCCGCCCTGGGTTGCCTTGTG |
| | | | AAAGATTATTTCCCTGAGCCAGTTACCGTAAGTTGGAACAGTGGG |
| | | | GCGCTGACAAGTGGTGTGCACACGTTTCCTGCCGTCCTGCAATCAT |
| | | | CGGGCTTGTATAGCCTCAGCTCTGTGGTCACTGTCCCAAGTTCATC |
| | | | GCTGGGCACTCAGACGTATATTTGCAATGTGAACCACAAACCTTC |
| | | | AAATACAAAAGTGGATAAACGCGTAGAACCGAAATCGTGTGATAA |
| | | | AACTCACACATGCCCGCCATGCCCGGCACCTGAACTGCTTGGTGGT |
| | | | CCCAGCGTGTTCCTGTTCCCGCCGAAGCCTAAAGATACTCTAATGA |
| | | | TCAGCCGTACGCCAGAGGTGACATGTGTCGTGGTTGACGTGTCCC |
| | | | ACGAAGATCCCGAAGTTAAGTTCAATTGGTATGTTGATGGTGTAG |
| | | | AGGTACACAATGCTAAGACTAAACCTCGCGAGGAGCAGTACGCCT |
| | | | CGACCTATCGTGTCGTGAGCGTTCTGACCGTCCTTCACCAAGATTG |
| | | | GCTTAACGGCAAAGAATATAAGTGCAAGGTAAGCAATAAAGCACT |
| | | | TCCGGCCCCAATCGAGAAAACCATTTCCAAGGCCAAAGGTCAACC |
| | | | AAGAGAACCCCAGGTGTATACTCTTCCGCCTTCTCGTGAGGAAAT |
| | | | GACTAAAAATCAAGTATCCCTTACGTGTCTGGTTAAAGGTTTTTAT |
| | | | CCTAGCGATATTGCTGTTGAATGGGAATCGAACGGTCAGCCGGAG |
| | | | AATAATTATAAAACAACGCCACCCGTCCTGGATAGCGACGGCTCA |
| | | | TTTTTTCTGTATAGCAAACTGACTGTAGATAAATCACGGTGGCAGC |
| | | | AGGGCAATGTATTCAGTTGCTCCGTTATGCATGAAGCGTTACATAA |
| | | | TCACTACACGCAGAAATCTCTTAGTCTTTCACCCGGT |
| 502 | ATX-P-608 | HC IgG1 Fc- | CAGGTGCAGCTGCAGGAGTCGGGCCCAGGACTGGTGAAGCCTTCG |
| | | nucleotide | GGGACCCTGTCCCTCACCTGCGCTGTCTCTGGTGGCTCCATCAGCA |
| | | | GTAGTAACTGGTGGAGTTGGGTCCGCCAGTCCCCAGGGAAGGGGC |
| | | | TGGAGTGGATTGGGGAAATCTATCATACTGGGAGCACCAACAAAA |
| | | | AACCGTCCCTCAAGAGTCGAGTCATCATATCAGTAGACAAGTCCA |
| | | | AGAACCAGTTCTCCCTGAAACTGATCTCTGTGAACGCCGCGGACA |
| | | | CGGCCATATATTACTGTGCGAGAGATCGGGAAGGGGGAACTACTG |
| | | | AAGCTTTTGATATCTGGGGACAAGGGACAATGGTCACCGTCTCTTC |
| | | | AGCTAGCACTAAAGGGCCTTCTGTATTTCCCTTGGCCCCGTCCAGC |
| | | | AAATCGACCTCGGGAGGGACAGCCGCCCTGGGTTGCCTTGTGAAA |
| | | | GATTATTTCCCTGAGCCAGTTACCGTAAGTTGGAACAGTGGGGCG |
| | | | CTGACAAGTGGTGTGCACACGTTTCCTGCCGTCCTGCAATCATCGG |
| | | | GCTTGTATAGCCTCAGCTCTGTGGTCACTGTCCCAAGTTCATCGCT |
| | | | GGGCACTCAGACGTATATTTGCAATGTGAACCACAAACCTTCAAA |
| | | | TACAAAAGTGGATAAACGCGTAGAACCGAAATCGTGTGATAAAAC |
| | | | TCACACATGCCCGCCATGCCCGGCACCTGAACTGCTTGGTGGTCCC |
| | | | AGCGTGTTCCTGTTCCCGCCGAAGCCTAAAGATACTCTAATGATCA |
| | | | GCCGTACGCCAGAGGTGACATGTGTCGTGGTTGACGTGTCCCACG |
| | | | AAGATCCCGAAGTTAAGTTCAATTGGTATGTTGATGGTGTAGAGG |
| | | | TACACAATGCTAAGACTAAACCTCGCGAGGAGCAGTACGCCTCGA |
| | | | CCTATCGTGTCGTGAGCGTTCTGACCGTCCTTCACCAAGATTGGCT |
| | | | TAACGGCAAAGAATATAAGTGCAAGGTAAGCAATAAAGCACTTCC |
| | | | GGCCCCAATCGAGAAAACCATTTCCAAGGCCAAAGGTCAACCAAG |
| | | | AGAACCCCAGGTGTATACTCTTCCGCCTTCTCGTGAGGAAATGACT |
| | | | AAAAATCAAGTATCCCTTACGTGTCTGGTTAAAGGTTTTTATCCTA |
| | | | GCGATATTGCTGTTGAATGGGAATCGAACGGTCAGCCGGAGAATA |
| | | | ATTATAAAACAACGCCACCCGTCCTGGATAGCGACGGCTCATTTTT |
| | | | TCTGTATAGCAAACTGACTGTAGATAAATCACGGTGGCAGCAGGG |
| | | | CAATGTATTCAGTTGCTCCGTTATGCATGAAGCGTTACATAATCAC |
| | | | TACACGCAGAAATCTCTTAGTCTTTCACCCGGT |
| 503 | ATX-P-609 | HC IgG1 Fc- | CAGGTGCAGCTGCAGGAGTCGGGCCCAGGACTGGTGAAGCCTTCG |
| | | nucleotide | GGGACCCTGTCCCTCACCTGCGCTGTCTCTGGTGGCTCCATCAGCA |
| | | | GTAGTAACTGGTGGAGTTGGGTCCGCCAGCCCCCAGGGAAGGGGC |
| | | | TGGAGTGGATTGGGGAAATCTATCATAGTGGGAGCACCAACTACA |
| | | | ACCCGTCCCTCAAGAGTCGAGTCACCATATCAGTAGACAAGTCCA |
| | | | AGAACCAGTTCTCCCTGAAGCTGAGGTCTGTGACCGCCGCGGACA |
| | | | CGGCCGTTTATTACTGTGCGAGAGATCAACTAAGTAGCGGACCTA |
| | | | CGGATGCTTTTGATATCTGGGGACAAGGGACAATGGTCACCGTCT |
| | | | CTTCAGCTAGCACTAAAGGGCCTTCTGTATTTCCCTTGGCCCCGTC |
| | | | CAGCAAATCGACCTCGGGAGGGACAGCCGCCCTGGGTTGCCTTGT |
| | | | GAAAGATTATTTCCCTGAGCCAGTTACCGTAAGTTGGAACAGTGG |
| | | | GGCGCTGACAAGTGGTGTGCACACGTTTCCTGCCGTCCTGCAATCA |
| | | | TCGGGCTTGTATAGCCTCAGCTCTGTGGTCACTGTCCCAAGTTCAT |
| | | | CGCTGGGCACTCAGACGTATATTTGCAATGTGAACCACAAACCTTC |
| | | | AAATACAAAAGTGGATAAACGCGTAGAACCGAAATCGTGTGATAA |
| | | | AACTCACACATGCCCGCCATGCCCGGCACCTGAACTGCTTGGTGGT |
| | | | CCCAGCGTGTTCCTGTTCCCGCCGAAGCCTAAAGATACTCTAATGA |
| | | | TCAGCCGTACGCCAGAGGTGACATGTGTCGTGGTTGACGTGTCCC |
| | | | ACGAAGATCCCGAAGTTAAGTTCAATTGGTATGTTGATGGTGTAG |
| | | | AGGTACACAATGCTAAGACTAAACCTCGCGAGGAGCAGTACGCCT |
| | | | CGACCTATCGTGTCGTGAGCGTTCTGACCGTCCTTCACCAAGATTG |
| | | | GCTTAACGGCAAAGAATATAAGTGCAAGGTAAGCAATAAAGCACT |
| | | | TCCGGCCCCAATCGAGAAAACCATTTCCAAGGCCAAAGGTCAACC |
| | | | AAGAGAACCCCAGGTGTATACTCTTCCGCCTTCTCGTGAGGAAAT |
| | | | GACTAAAAATCAAGTATCCCTTACGTGTCTGGTTAAAGGTTTTTAT |
| | | | CCTAGCGATATTGCTGTTGAATGGGAATCGAACGGTCAGCCGGAG |
| | | | AATAATTATAAAACAACGCCACCCGTCCTGGATAGCGACGGCTCA |
| | | | TTTTTTCTGTATAGCAAACTGACTGTAGATAAATCACGGTGGCAGC |
| | | | AGGGCAATGTATTCAGTTGCTCCGTTATGCATGAAGCGTTACATAA |
| | | | TCACTACACGCAGAAATCTCTTAGTCTTTCACCCGGT |
| 504 | ATX-P-563 | HC IgG1 Fc- | CAGGTGCAGCTGCAGGAGTCGGGCCCAGGACTGATGAAGCCTTCG |
| | | nucleotide | GAGACCCTGTCCCTCACCTGCACTGTCTCTGGTGGCTCCATCAGTA |
| | | | GTCACTACTGGAGCTGGATCCGGCAACCCCCAGGGAAGGGACTGG |
| | | | AGTGGATTGGATATATCTTTTACAGTGGGAACATAAATTACAACCC |
| | | | CTCCCTCAAGAGTCGAGTCACCATATCAGTAGACACGTCCAAGAA |
| | | | CCAGTTCTCCCTGAAGCTGAGGTCTGTGACCACTGCGGACACGGC |
| | | | CGTATATTACTGTGCGAGAGATCGAGGTGGGAGCTATTCGTACCA |
| | | | CTTTGACTGCTGGGGCCAGGGAACCCTGGTCACCGTCTCCTCAGCT |
| | | | AGCACTAAAGGGCCTTCTGTATTTCCCTTGGCCCCGTCCAGCAAAT |
| | | | CGACCTCGGGAGGGACAGCCGCCCTGGGTTGCCTTGTGAAAGATT |
| | | | ATTTCCCTGAGCCAGTTACCGTAAGTTGGAACAGTGGGGCGCTGA |
| | | | CAAGTGGTGTGCACACGTTTCCTGCCGTCCTGCAATCATCGGGCTT |
| | | | GTATAGCCTCAGCTCTGTGGTCACTGTCCCAAGTTCATCGCTGGGC |
| | | | ACTCAGACGTATATTTGCAATGTGAACCACAAACCTTCAAATACA |
| | | | AAAGTGGATAAACGCGTAGAACCGAAATCGTGTGATAAAACTCAC |
| | | | ACATGCCCGCCATGCCCGGCACCTGAACTGCTTGGTGGTCCCAGC |
| | | | GTGTTCCTGTTCCCGCCGAAGCCTAAAGATACTCTAATGATCAGCC |
| | | | GTACGCCAGAGGTGACATGTGTCGTGGTTGACGTGTCCCACGAAG |
| | | | ATCCCGAAGTTAAGTTCAATTGGTATGTTGATGGTGTAGAGGTACA |
| | | | CAATGCTAAGACTAAACCTCGCGAGGAGCAGTACGCCTCGACCTA |
| | | | TCGTGTCGTGAGCGTTCTGACCGTCCTTCACCAAGATTGGCTTAAC |
| | | | GGCAAAGAATATAAGTGCAAGGTAAGCAATAAAGCACTTCCGGCC |
| | | | CCAATCGAGAAAACCATTTCCAAGGCCAAAGGTCAACCAAGAGAA |
| | | | CCCCAGGTGTATACTCTTCCGCCTTCTCGTGAGGAAATGACTAAAA |
| | | | ATCAAGTATCCCTTACGTGTCTGGTTAAAGGTTTTTATCCTAGCGA |
| | | | TATTGCTGTTGAATGGGAATCGAACGGTCAGCCGGAGAATAATTA |
| | | | TAAAACAACGCCACCCGTCCTGGATAGCGACGGCTCATTTTTTCTG |
| | | | TATAGCAAACTGACTGTAGATAAATCACGGTGGCAGCAGGGCAAT |
| | | | GTATTCAGTTGCTCCGTTATGCATGAAGCGTTACATAATCACTACA |
| | | | CGCAGAAATCTCTTAGTCTTTCACCCGGT |
| 505 | ATX-P-570 | HC IgG1 Fc- | CAGGTGCAGCTGCAGGAGTCGGGCCCAGGACTGGTGAAGCCTTCG |
| | | nucleotide | GAGACTATGTCCCTCACCTGCACTGTCTCTGGTGGCTCCTTCACTG |
| | | | GATACTACTGGAGTTGGATCCGGCAGCCCCCAGGGAAGGGACTGG |
| | | | AGTGGATTGGATATGTCCATTACAGTGGGGGCACCAAAAGCAACC |
| | | | CCTCCCTCAAGAGTCGAGTCACCATATCAGTAGACACGTCCAAGA |
| | | | ACCAGTTTTCCCTGAAGCTGAGCTCTGTGACCGCTGCGGACACGGC |
| | | | CGTGTATTACTGTGCGAGAGAGAGGTATGAGTGGAACTCCTACTTT |
| | | | GACTACTGGGGCCAGGGAACCCTGGTCACCGTCTCCTCAGCTAGC |
| | | | ACTAAAGGGCCTTCTGTATTTCCCTTGGCCCCGTCCAGCAAATCGA |
| | | | CCTCGGGAGGGACAGCCGCCCTGGGTTGCCTTGTGAAAGATTATTT |
| | | | CCCTGAGCCAGTTACCGTAAGTTGGAACAGTGGGGCGCTGACAAG |
| | | | TGGTGTGCACACGTTTCCTGCCGTCCTGCAATCATCGGGCTTGTAT |
| | | | AGCCTCAGCTCTGTGGTCACTGTCCCAAGTTCATCGCTGGGCACTC |
| | | | AGACGTATATTTGCAATGTGAACCACAAACCTTCAAATACAAAAG |
| | | | TGGATAAACGCGTAGAACCGAAATCGTGTGATAAAACTCACACAT |
| | | | GCCCGCCATGCCCGGCACCTGAACTGCTTGGTGGTCCCAGCGTGTT |
| | | | CCTGTTCCCGCCGAAGCCTAAAGATACTCTAATGATCAGCCGTACG |
| | | | CCAGAGGTGACATGTGTCGTGGTTGACGTGTCCCACGAAGATCCC |
| | | | GAAGTTAAGTTCAATTGGTATGTTGATGGTGTAGAGGTACACAAT |
| | | | GCTAAGACTAAACCTCGCGAGGAGCAGTACGCCTCGACCTATCGT |
| | | | GTCGTGAGCGTTCTGACCGTCCTTCACCAAGATTGGCTTAACGGCA |
| | | | AAGAATATAAGTGCAAGGTAAGCAATAAAGCACTTCCGGCCCCAA |
| | | | TCGAGAAAACCATTTCCAAGGCCAAAGGTCAACCAAGAGAACCCC |
| | | | AGGTGTATACTCTTCCGCCTTCTCGTGAGGAAATGACTAAAAATCA |
| | | | AGTATCCCTTACGTGTCTGGTTAAAGGTTTTTATCCTAGCGATATT |
| | | | GCTGTTGAATGGGAATCGAACGGTCAGCCGGAGAATAATTATAAA |
| | | | ACAACGCCACCCGTCCTGGATAGCGACGGCTCATTTTTTCTGTATA |
| | | | GCAAACTGACTGTAGATAAATCACGGTGGCAGCAGGGCAATGTAT |
| | | | TCAGTTGCTCCGTTATGCATGAAGCGTTACATAATCACTACACGCA |
| | | | GAAATCTCTTAGTCTTTCACCCGGT |
| 506 | ATX-P-571 | LC Kappa | DIQMTQSPSSLSASVGDRVTITCRASQSISSYLNWYQQKPGKAPKVLI |
| | | | YAASSLQSGIPSRFSGSGSGTDFTLTISSLQPEDFATYYCQETYSVPLTF |
| | | | GGGTKVEIKRTVAAPSVFIFPPSDEQLKSGTASVVCLLNNFYPREAKV |
| | | | QWKVDNALQSGNSQESVTEQDSKDSTYSLSSTLTLSKADYEKHKVY |
| | | | ACEVTHQGLSSPVTKSFNRGEC |
| 507 | ATX-P-577 | LC Kappa | DIQMTQSPSSLSASVGDRVTITCRASQDIRNDLGWYQQKPGKVPKRLI |
| | | | YAASSLQSGVPSRFSGSGSGTEFTLTISSLQPEDFASYYCLQYNNYPFT |
| | | | LGPGTKVDIKRTVAAPSVFIFPPSDEQLKSGTASVVCLLNNFYPREAK |
| | | | VQWKVDNALQSGNSQESVTEQDSKDSTYSLSSTLILSKADYEKHKV |
| | | | YACEVTHQGLSSPVTKSFNRGEC |
| 508 | ATX-P-579 | LC Kappa | DIQMTQSPSSLSASVGDRVTITCRASQGIRKDLGWYQQKPGKAPKRLI |
| | | | YTASTLQSGVPSRFSGSGSGTEFTLTISSLQPEDFATYYCLQYNNYPFT |
| | | | FGPGTKVDIKRTVAAPSVFIFPPSDEQLKSGTASVVCLLNNFYPREAK |
| | | | VQWKVDNALQSGNSQESVTEQDSKDSTYSLSSTLTLSKADYEKHKV |
| | | | YACEVTHQGLSSPVTKSFNRGEC |
| 509 | ATX-P-580 | LC Kappa | DIQMTQSPSSLSASVGDRVTITCRASQGIRNDLGWYQQKPGKAPKRLI |
| | | | YAASSLQSGVPSRFSGSGSGTEFTLAISSLQPEDFATYYCLHFNSYPFT |
| | | | FGPGTKVDIKRTVAAPSVFIFPPSDEQLKSGTASVVCLLNNFYPREAK |
| | | | VQWKVDNALQSGNSQESVTEQDSKDSTYSLSSTLTLSKADYEKHKV |
| | | | YACEVTHQGLSSPVTKSFNRGEC |
| 510 | ATX-P-582 | LC Kappa | DIQMTQSPSSLSASVGDRVTITCRASQNINNYLNWFRQKPGKAPKLLI |
| | | | FAASSLQSGVPSRFSGSESGTDFTLTISSLQPEDFATYYCQQSYSTPLTF |
| | | | GGGTKVEIKRTVAAPSVFIFPPSDEQLKSGTASVVCLLNNFYPREAKV |
| | | | QWKVDNALQSGNSQESVTEQDSKDSTYSLSSTLTLSKADYEKHKVY |
| | | | ACEVTHQGLSSPVTKSFNRGEC |
| 511 | ATX-P-598 | LC Kappa | DIVMTQSPDSLAVSLGERATINCKSSQSVLYSSNNKNYLAWYQQKPG |
| | | | QPPELLIYWASTRESGVPDRFSGSGSGTDFTLTISSLQAEDMAVYYCQ |
| | | | QFYNTPYTFGQGTKVDIKRTVAAPSVFIFPPSDEQLKSGTASVVCLLN |
| | | | NFYPREAKVQWKVDNALQSGNSQESVTEQDSKDSTYSLSSTLTLSKA |
| | | | DYEKHKVYACEVTHQGLSSPVTKSFNRGEC |
| 512 | ATX-P-603 | LC Kappa | EIVLTQSPGTLSLSPGERATLSCRASQSVSSSYLAWYQQKPGQAPRLLI |
| | | | YGASSRATGIPDRFSGSGSGTDFTLTISRLEPEDFAVYYCQHYGNSPLT |
| | | | FGGGTKVEIKRTVAAPSVFIFPPSDEQLKSGTASVVCLLNNFYPREAK |
| | | | VQWKVDNALQSGNSQESVTEQDSKDSTYSLSSTLTLSKADYEKHKV |
| | | | YACEVTHQGLSSPVTKSFNRGEC |
| 513 | ATX-P-608 | LC Kappa | EIVMTQSPATLSVSPGERATLSCRASQSVSSNLAWYQQKPGQAPRLLI |
| | | | YGASTRATGIPVRFSGSGSGTQFTLTISSLQSEDFAVYYCQQYDNWRT |
| | | | FGQGTRLEIKRTVAAPSVFIFPPSDEQLKSGTASVVCLLNNFYPREAKV |
| | | | QWKVDNALQSGNSQESVTEQDSKDSTYSLSSTLTLSKADYEKHKVY |
| | | | ACEVTHQGLSSPVTKSFNRGEC |
| 514 | ATX-P-609 | LC Kappa | EIVMTQSPATLSVSPGERATLSCRASQSVSSNLAWYQQKPGQAPRLLI |
| | | | YGASTRATGIPVRFSGSGSGTQFTLTISSLQSEDFAVYYCQQYDNWRT |
| | | | FGQGTKLEIKRTVAAPSVFIFPPSDEQLKSGTASVVCLLNNFYPREAK |
| | | | VQWKVDNALQSGNSQESVTEQDSKDSTYSLSSTLTLSKADYEKHKV |
| | | | YACEVTHQGLSSPVTKSFNRGEC |
| 515 | ATX-P-563 | LC Kappa | DIQMTQSPSSVSASVGDRVTITCRASQSFAGWLAWYQQKPGKAPKLL |
| | | | IYAASTLQSGVPSRFSGSGSGTDFTLTISSLQPEDFATYYCQQANSFPL |
| | | | TFGGGTKVEIKRTVAAPSVFIFPPSDEQLKSGTASVVCLLNNFYPREA |
| | | | KVQWKVDNALQSGNSQESVTEQDSKDSTYSLSSTLTLSKADYEKHK |
| | | | VYACEVTHQGLSSPVIKSFNRGEC |
| 516 | ATX-P-570 | LC Kappa | DIVMTQSPDSLAVSLGERATINCKSSQSVLYSSNNKNYLAWYHQKPG |
| | | | QPPKLLIYWASTRESGVPDRFSGSGSGTDFTLTISSLQAEDVAVYYCQ |
| | | | QYYSSPRTFGQGTKVEIKRTVAAPSVFIFPPSDEQLKSGTASVVCLLNN |
| | | | FYPREAKVQWKVDNALQSGNSQESVTEQDSKDSTYSLSSTLTLSKAD |
| | | | YEKHKVYACEVTHQGLSSPVTKSFNRGEC |
| 517 | ATX-P-571 | LC Kappa- | GACATCCAGATGACCCAGTCTCCATCCTCCCTGTCTGCATCTGTGG |
| | | nucleotide | GAGACAGAGTCACCATCACTTGCCGGGCAAGTCAGAGCATTAGCA |
| | | | GCTATTTAAATTGGTATCAGCAGAAACCAGGGAAAGCCCCTAAGG |
| | | | TCCTGATCTATGCTGCATCCAGTTTGCAGAGTGGGATCCCATCACG |
| | | | GTTCAGTGGCAGTGGATCTGGGACAGATTTCACTCTCACCATCAGC |
| | | | AGTCTGCAACCTGAAGATTTTGCAACTTACTACTGTCAAGAGACTT |
| | | | ACAGTGTTCCGCTCACTTTCGGCGGAGGGACCAAGGTGGAGATCA |
| | | | AACGTACGGTAGCTGCCCCTTCAGTTTTTATCTTTCCGCCGTCTGA |
| | | | CGAGCAGTTAAAATCCGGGACCGCTTCTGTAGTTTGCCTGCTGAAT |
| | | | AATTTTTATCCGCGTGAGGCTAAAGTACAATGGAAAGTCGACAAT |
| | | | GCTTTGCAGTCGGGAAATTCACAGGAAAGTGTTACGGAGCAGGAT |
| | | | TCTAAAGATTCCACATATTCACTCAGCTCCACCCTTACACTGAGCA |
| | | | AAGCCGACTATGAAAAACATAAAGTTTACGCATGTGAGGTGACGC |
| | | | ACCAAGGATTATCCAGTCCGGTCACAAAATCGTTTAACCGCGGTG |
| | | | AGTGT |
| 518 | ATX-P-577 | LC Kappa- | GACATCCAGATGACCCAGTCTCCATCCTCCCTGTCTGCATCTGTAG |
| | | nucleotide | GAGACAGAGTCACCATCACTTGCCGGGCAAGTCAGGACATTAGAA |
| | | | ATGATTTAGGCTGGTATCAGCAGAAACCAGGGAAAGTCCCTAAGC |
| | | | GCCTGATCTATGCTGCATCTAGTTTGCAAAGTGGGGTCCCATCAAG |
| | | | GTTCAGCGGCAGTGGATCTGGGACAGAATTCACTCTCACAATCAG |
| | | | CAGCCTGCAGCCTGAAGATTTCGCAAGTTATTACTGTCTACAGTAT |
| | | | AATAATTATCCATTCACTCTCGGCCCTGGGACCAAAGTGGATATCA |
| | | | AACGTACGGTAGCTGCCCCTTCAGTTTTTATCTTTCCGCCGTCTGA |
| | | | CGAGCAGTTAAAATCCGGGACCGCTTCTGTAGTTTGCCTGCTGAAT |
| | | | AATTTTTATCCGCGTGAGGCTAAAGTACAATGGAAAGTCGACAAT |
| | | | GCTTTGCAGTCGGGAAATTCACAGGAAAGTGTTACGGAGCAGGAT |
| | | | TCTAAAGATTCCACATATTCACTCAGCTCCACCCTTACACTGAGCA |
| | | | AAGCCGACTATGAAAAACATAAAGTTTACGCATGTGAGGTGACGC |
| | | | ACCAAGGATTATCCAGTCCGGTCACAAAATCGTTTAACCGCGGTG |
| | | | AGTGT |
| 519 | ATX-P-579 | LC Kappa- | GACATCCAGATGACCCAGTCTCCATCCTCCCTGTCTGCATCTGTAG |
| | | nucleotide | GAGACAGAGTCACCATCACTTGCCGGGCAAGTCAGGGCATTAGAA |
| | | | AAGATTTAGGCTGGTATCAGCAGAAACCAGGGAAAGCCCCTAAGC |
| | | | GCCTGATCTATACTGCATCCACTTTACAAAGTGGGGTCCCATCAAG |
| | | | GTTCAGCGGCAGTGGATCTGGGACAGAATTCACTCTCACAATCAG |
| | | | CAGCCTGCAGCCTGAAGATTTTGCAACTTATTACTGTCTACAGTAT |
| | | | AATAATTACCCATTCACTTTCGGCCCTGGGACCAAAGTGGATATCA |
| | | | AACGTACGGTAGCTGCCCCTTCAGTTTTTATCTTTCCGCCGTCTGA |
| | | | CGAGCAGTTAAAATCCGGGACCGCTTCTGTAGTTTGCCTGCTGAAT |
| | | | AATTTTTATCCGCGTGAGGCTAAAGTACAATGGAAAGTCGACAAT |
| | | | GCTTTGCAGTCGGGAAATTCACAGGAAAGTGTTACGGAGCAGGAT |
| | | | TCTAAAGATTCCACATATTCACTCAGCTCCACCCTTACACTGAGCA |
| | | | AAGCCGACTATGAAAAACATAAAGTTTACGCATGTGAGGTGACGC |
| | | | ACCAAGGATTATCCAGTCCGGTCACAAAATCGTTTAACCGCGGTG |
| | | | AGTGT |
| 520 | ATX-P-580 | LC Kappa- | GACATCCAGATGACCCAGTCTCCATCCTCCCTGTCTGCTTCTGTCG |
| | | nucleotide | GAGACAGAGTCACCATCACTTGCCGGGCAAGTCAGGGCATTAGAA |
| | | | ATGATTTAGGCTGGTATCAGCAGAAACCAGGGAAAGCCCCTAAGC |
| | | | GCCTGATCTATGCTGCATCCAGTTTGCAAAGTGGGGTCCCATCAAG |
| | | | GTTCAGCGGCAGTGGATCTGGGACAGAATTCACTCTCGCAATCAG |
| | | | CAGCCTGCAGCCTGAAGATTTTGCAACTTATTACTGTCTACACTTT |
| | | | AATAGTTACCCATTCACTTTCGGCCCTGGGACCAAAGTGGATATCA |
| | | | AACGTACGGTAGCTGCCCCTTCAGTTTTTATCTTTCCGCCGTCTGA |
| | | | CGAGCAGTTAAAATCCGGGACCGCTTCTGTAGTTTGCCTGCTGAAT |
| | | | AATTTTTATCCGCGTGAGGCTAAAGTACAATGGAAAGTCGACAAT |
| | | | GCTTTGCAGTCGGGAAATTCACAGGAAAGTGTTACGGAGCAGGAT |
| | | | TCTAAAGATTCCACATATTCACTCAGCTCCACCCTTACACTGAGCA |
| | | | AAGCCGACTATGAAAAACATAAAGTTTACGCATGTGAGGTGACGC |
| | | | ACCAAGGATTATCCAGTCCGGTCACAAAATCGTTTAACCGCGGTG |
| | | | AGTGT |
| 521 | ATX-P-582 | LC Kappa- | GACATCCAGATGACCCAGTCTCCATCCTCCCTGTCTGCATCTGTAG |
| | | nucleotide | GAGACAGAGTCACCATCACTTGCCGGGCAAGTCAGAACATTAACA |
| | | | ACTATTTAAATTGGTTCCGGCAGAAACCAGGGAAAGCCCCTAAGC |
| | | | TCCTGATCTTTGCTGCATCCAGTTTACAAAGTGGGGTCCCATCAAG |
| | | | ATTCAGTGGCAGTGAATCTGGGACAGATTTCACTCTCACCATCAGC |
| | | | AGTCTGCAACCTGAGGATTTTGCGACTTACTACTGTCAACAGAGTT |
| | | | ACAGTACCCCTCTCACTTTCGGCGGAGGGACCAAGGTGGAGATCA |
| | | | AACGTACGGTAGCTGCCCCTTCAGTTTTTATCTTTCCGCCGTCTGA |
| | | | CGAGCAGTTAAAATCCGGGACCGCTTCTGTAGTTTGCCTGCTGAAT |
| | | | AATTTTTATCCGCGTGAGGCTAAAGTACAATGGAAAGTCGACAAT |
| | | | GCTTTGCAGTCGGGAAATTCACAGGAAAGTGTTACGGAGCAGGAT |
| | | | TCTAAAGATTCCACATATTCACTCAGCTCCACCCTTACACTGAGCA |
| | | | AAGCCGACTATGAAAAACATAAAGTTTACGCATGTGAGGTGACGC |
| | | | ACCAAGGATTATCCAGTCCGGTCACAAAATCGTTTAACCGCGGTG |
| | | | AGTGT |
| 522 | ATX-P-598 | LC Kappa- | GACATCGTGATGACTCAGTCTCCAGACTCCCTGGCTGTGTCTCTGG |
| | | nucleotide | GCGAGAGGGCCACCATCAACTGCAAGTCCAGCCAGAGTGTTTTAT |
| | | | ACAGCTCCAACAATAAGAACTACTTAGCTTGGTACCAGCAGAAAC |
| | | | CAGGACAGCCTCCTGAGCTGCTCATTTACTGGGCATCTACCCGGGA |
| | | | ATCCGGGGTCCCTGACCGATTCAGTGGCAGCGGGTCTGGGACAGA |
| | | | TTTCACTCTCACCATCAGCAGCCTGCAGGCTGAAGATATGGCAGTT |
| | | | TATTACTGTCAACAATTTTATAATACTCCGTACACTTTTGGCCAGG |
| | | | GGACCAAAGTGGATATCAAACGTACGGTAGCTGCCCCTTCAGTTTT |
| | | | TATCTTTCCGCCGTCTGACGAGCAGTTAAAATCCGGGACCGCTTCT |
| | | | GTAGTTTGCCTGCTGAATAATTTTTATCCGCGTGAGGCTAAAGTAC |
| | | | AATGGAAAGTCGACAATGCTTTGCAGTCGGGAAATTCACAGGAAA |
| | | | GTGTTACGGAGCAGGATTCTAAAGATTCCACATATTCACTCAGCTC |
| | | | CACCCTTACACTGAGCAAAGCCGACTATGAAAAACATAAAGTTTA |
| | | | CGCATGTGAGGTGACGCACCAAGGATTATCCAGTCCGGTCACAAA |
| | | | ATCGTTTAACCGCGGTGAGTGT |
| 523 | ATX-P-603 | LC Kappa- | GAAATTGTGTTGACGCAGTCTCCAGGCACCCTGTCTTTGTCTCCAG |
| | | nucleotide | GGGAAAGAGCCACCCTCTCCTGCAGGGCCAGTCAGAGTGTTAGCA |
| | | | GCAGCTACTTAGCCTGGTACCAGCAGAAACCTGGCCAGGCTCCCA |
| | | | GGCTCCTCATCTATGGTGCATCCAGCAGGGCCACTGGCATCCCAG |
| | | | ACAGGTTCAGTGGCAGTGGGTCTGGGACAGACTTCACTCTCACCA |
| | | | TCAGCAGACTGGAGCCTGAAGATTTTGCAGTGTATTACTGTCAGCA |
| | | | TTATGGTAACTCACCGCTCACTTTCGGCGGAGGGACCAAGGTGGA |
| | | | GATCAAACGTACGGTAGCTGCCCCTTCAGTTTTTATCTTTCCGCCG |
| | | | TCTGACGAGCAGTTAAAATCCGGGACCGCTTCTGTAGTTTGCCTGC |
| | | | TGAATAATTTTTATCCGCGTGAGGCTAAAGTACAATGGAAAGTCG |
| | | | ACAATGCTTTGCAGTCGGGAAATTCACAGGAAAGTGTTACGGAGC |
| | | | AGGATTCTAAAGATTCCACATATTCACTCAGCTCCACCCTTACACT |
| | | | GAGCAAAGCCGACTATGAAAAACATAAAGTTTACGCATGTGAGGT |
| | | | GACGCACCAAGGATTATCCAGTCCGGTCACAAAATCGTTTAACCG |
| | | | CGGTGAGTGT |
| 524 | ATX-P-608 | LC Kappa- | GAAATAGTGATGACGCAGTCTCCAGCCACCCTGTCTGTGTCTCCAG |
| | | nucleotide | GGGAAAGAGCCACCCTCTCCTGCAGGGCCAGTCAGAGTGTTAGCA |
| | | | GCAACTTAGCCTGGTACCAGCAGAAACCTGGCCAGGCTCCCAGGC |
| | | | TCCTCATCTATGGTGCATCCACCAGGGCCACTGGTATCCCAGTCAG |
| | | | GTTCAGTGGCAGTGGGTCTGGGACACAGTTCACTCTCACCATCAGC |
| | | | AGCCTGCAGTCTGAAGATTTTGCAGTTTATTATTGTCAGCAATATG |
| | | | ATAACTGGCGGACGTTCGGCCAAGGGACACGACTGGAGATTAAAC |
| | | | GTACGGTAGCTGCCCCTTCAGTTTTTATCTTTCCGCCGTCTGACGA |
| | | | GCAGTTAAAATCCGGGACCGCTTCTGTAGTTTGCCTGCTGAATAAT |
| | | | TTTTATCCGCGTGAGGCTAAAGTACAATGGAAAGTCGACAATGCT |
| | | | TTGCAGTCGGGAAATTCACAGGAAAGTGTTACGGAGCAGGATTCT |
| | | | AAAGATTCCACATATTCACTCAGCTCCACCCTTACACTGAGCAAAG |
| | | | CCGACTATGAAAAACATAAAGTTTACGCATGTGAGGTGACGCACC |
| | | | AAGGATTATCCAGTCCGGTCACAAAATCGTTTAACCGCGGTGAGT |
| | | | GT |
| 525 | ATX-P-609 | LC Kappa- | GAAATAGTGATGACGCAGTCTCCAGCCACCCTGTCTGTGTCTCCAG |
| | | nucleotide | GGGAAAGAGCCACCCTCTCCTGCAGGGCCAGTCAGAGTGTTAGCA |
| | | | GCAACTTAGCCTGGTACCAGCAGAAACCTGGCCAGGCTCCCAGGC |
| | | | TCCTCATCTATGGTGCATCCACCAGGGCCACTGGTATCCCAGTCAG |
| | | | GTTCAGTGGCAGTGGGTCTGGGACACAGTTCACTCTCACCATCAGC |
| | | | AGCCTGCAGTCTGAAGATTTTGCAGTTTATTATTGTCAGCAATATG |
| | | | ATAACTGGCGGACGTTCGGCCAAGGGACCAAGCTGGAAATCAAAC |
| | | | GTACGGTAGCTGCCCCTTCAGTTTTTATCTTTCCGCCGTCTGACGA |
| | | | GCAGTTAAAATCCGGGACCGCTTCTGTAGTTTGCCTGCTGAATAAT |
| | | | TTTTATCCGCGTGAGGCTAAAGTACAATGGAAAGTCGACAATGCT |
| | | | TTGCAGTCGGGAAATTCACAGGAAAGTGTTACGGAGCAGGATTCT |
| | | | AAAGATTCCACATATTCACTCAGCTCCACCCTTACACTGAGCAAAG |
| | | | CCGACTATGAAAAACATAAAGTTTACGCATGTGAGGTGACGCACC |
| | | | AAGGATTATCCAGTCCGGTCACAAAATCGTTTAACCGCGGTGAGT |
| | | | GT |
| 526 | ATX-P-563 | LC Kappa- | GACATCCAGATGACCCAGTCTCCATCTTCCGTGTCTGCATCTGTCG |
| | | nucleotide | GAGACAGAGTCACCATCACTTGTCGGGCGAGTCAGAGTTTTGCCG |
| | | | GCTGGTTAGCCTGGTATCAGCAGAAACCAGGGAAAGCCCCTAAGC |
| | | | TCCTGATATATGCTGCATCCACTTTGCAAAGTGGGGTCCCATCAAG |
| | | | GTTCAGCGGCAGTGGATCTGGGACAGATTTCACTCTCACCATCAGC |
| | | | AGCCTGCAGCCTGAAGATTTTGCAACTTACTATTGTCAACAGGCTA |
| | | | ACAGTTTCCCTCTCACTTTCGGCGGAGGGACCAAGGTGGAGATCA |
| | | | AACGTACGGTAGCTGCCCCTTCAGTTTTTATCTTTCCGCCGTCTGA |
| | | | CGAGCAGTTAAAATCCGGGACCGCTTCTGTAGTTTGCCTGCTGAAT |
| | | | AATTTTTATCCGCGTGAGGCTAAAGTACAATGGAAAGTCGACAAT |
| | | | GCTTTGCAGTCGGGAAATTCACAGGAAAGTGTTACGGAGCAGGAT |
| | | | TCTAAAGATTCCACATATTCACTCAGCTCCACCCTTACACTGAGCA |
| | | | AAGCCGACTATGAAAAACATAAAGTTTACGCATGTGAGGTGACGC |
| | | | ACCAAGGATTATCCAGTCCGGTCACAAAATCGTTTAACCGCGGTG |
| | | | AGTGT |
| 527 | ATX-P-570 | LC Kappa- | GACATCGTGATGACCCAGTCTCCAGACTCCCTGGCTGTGTCTCTGG |
| | | nucleotide | GCGAGAGGGCCACCATCAACTGCAAGTCCAGTCAGAGTGTTTTAT |
| | | | ACAGCTCCAACAATAAGAATTACTTAGCTTGGTACCACCAGAAAC |
| | | | CAGGACAGCCTCCTAAGCTGCTCATTTACTGGGCATCTACCCGGGA |
| | | | ATCCGGGGTCCCTGACCGATTCAGTGGCAGCGGGTCTGGGACAGA |
| | | | TTTCACTCTCACCATCAGCAGCCTGCAGGCTGAAGATGTGGCAGTT |
| | | | TATTACTGTCAGCAATACTATAGTAGTCCTCGGACGTTCGGCCAAG |
| | | | GGACCAAGGTGGAAATCAAACGTACGGTAGCTGCCCCTTCAGTTT |
| | | | TTATCTTTCCGCCGTCTGACGAGCAGTTAAAATCCGGGACCGCTTC |
| | | | TGTAGTTTGCCTGCTGAATAATTTTTATCCGCGTGAGGCTAAAGTA |
| | | | CAATGGAAAGTCGACAATGCTTTGCAGTCGGGAAATTCACAGGAA |
| | | | AGTGTTACGGAGCAGGATTCTAAAGATTCCACATATTCACTCAGCT |
| | | | CCACCCTTACACTGAGCAAAGCCGACTATGAAAAACATAAAGTTT |
| | | | ACGCATGTGAGGTGACGCACCAAGGATTATCCAGTCCGGTCACAA |
| | | | AATCGTTTAACCGCGGTGAGTGT |
| 528 | ATX-P-560 | HC IgG1 Fc | QVQLQQSGPGLVKPSQTLSLTCAISGDSVSSNTAAWNWIRQSPSRGLE |
| | | | WLGRTYYRSKWYNDYAVSVKSRITINPDTSKNQFSLQLSSVTPQDTAI |
| | | | YYCASDNWNNGGPGFDPWGQGTLVTVSSASTKGPSVFPLAPSSKSTS |
| | | | GGTAALGCLVKDYFPEPVTVSWNSGALTSGVHTFPAVLQSSGLYSLS |
| | | | SVVTVPSSSLGTQTYICNVNHKPSNTKVDKRVEPKSCDKTHTCPPCPA |
| | | | PELLGGPSVFLFPPKPKDTLMISRTPEVTCVVVDVSHEDPEVKFNWYV |
| | | | DGVEVHNAKTKPREEQYASTYRVVSVLTVLHQDWLNGKEYKCKVS |
| | | | NKALPAPIEKTISKAKGQPREPQVYTLPPSREEMTKNQVSLTCLVKGF |
| | | | YPSDIAVEWESNGQPENNYKTTPPVLDSDGSFFLYSKLTVDKSRWQQ |
| | | | GNVFSCSVMHEALHNHYTQKSLSLSPG |
| 529 | ATX-P-561 | HC IgG1 Fc | QVQLQQSGPGLVKPSQTLSLTCAISGDSVSSNSAAWNWIRQSPSRGLE |
| | | | WLGRTYYRSKWYNGYAVSMKSRITINPDTSKNQFSLQLNSVTPEDTA |
| | | | MYYCAREGVGATTGFDYWGQGTLVTVSSASTKGPSVFPLAPSSKSTS |
| | | | GGTAALGCLVKDYFPEPVTVSWNSGALTSGVHTFPAVLQSSGLYSLS |
| | | | SVVTVPSSSLGTQTYICNVNHKPSNTKVDKRVEPKSCDKTHTCPPCPA |
| | | | PELLGGPSVFLFPPKPKDTLMISRTPEVTCVVVDVSHEDPEVKFNWYV |
| | | | DGVEVHNAKTKPREEQYASTYRVVSVLTVLHQDWLNGKEYKCKVS |
| | | | NKALPAPIEKTISKAKGQPREPQVYTLPPSREEMTKNQVSLTCLVKGF |
| | | | YPSDIAVEWESNGQPENNYKTTPPVLDSDGSFFLYSKLTVDKSRWQQ |
| | | | GNVFSCSVMHEALHNHYTQKSLSLSPG |
| 530 | ATX-P-562 | HC IgG1 Fc | QVQLQQSGPGLVKSSQTLSLTCAISGDTVSSNSAAWNWIRQSPSRGLE |
| | | | WLGRTFYRSRWSAAYAASVSSRITINPDTSKNQFSLQLTSVTPADTAV |
| | | | YYCAREGVGSSTGFDYWGQGTLVTVSSASTKGPSVFPLAPSSKSTSG |
| | | | GTAALGCLVKDYFPEPVTVSWNSGALTSGVHTFPAVLQSSGLYSLSS |
| | | | VVTVPSSSLGTQTYICNVNHKPSNTKVDKRVEPKSCDKTHTCPPCPAP |
| | | | ELLGGPSVFLFPPKPKDTLMISRTPEVTCVVVDVSHEDPEVKFNWYV |
| | | | DGVEVHNAKTKPREEQYASTYRVVSVLTVLHQDWLNGKEYKCKVS |
| | | | NKALPAPIEKTISKAKGQPREPQVYTLPPSREEMTKNQVSLTCLVKGF |
| | | | YPSDIAVEWESNGQPENNYKTTPPVLDSDGSFFLYSKLTVDKSRWQQ |
| | | | GNVFSCSVMHEALHNHYTQKSLSLSPG |
| 531 | ATX-P-566 | HC IgG1 Fc | QVQLQQSGPGLVKPSQTLSLTCAISGDSVSSNSAAWNWIRQSPSRGLE |
| | | | WLGRTYYRSKWFNNYSVSVKSRIAINPDTSKNQFSLQLNSVTPEDTA |
| | | | VYYCARDLGELLDWYFDLWGRGTLVTVSAASTKGPSVFPLAPSSKST |
| | | | SGGTAALGCLVKDYFPEPVTVSWNSGALTSGVHTFPAVLQSSGLYSL |
| | | | SSVVTVPSSSLGTQTYICNVNHKPSNTKVDKRVEPKSCDKTHTCPPCP |
| | | | APELLGGPSVFLFPPKPKDTLMISRTPEVTCVVVDVSHEDPEVKFNWY |
| | | | VDGVEVHNAKTKPREEQYASTYRVVSVLTVLHQDWLNGKEYKCKV |
| | | | SNKALPAPIEKTISKAKGQPREPQVYTLPPSREEMTKNQVSLTCLVKG |
| | | | FYPSDIAVEWESNGQPENNYKTTPPVLDSDGSFFLYSKLTVDKSRWQ |
| | | | QGNVFSCSVMHEALHNHYTQKSLSLSPG |
| 532 | ATX-P-572 | HC IgG1 Fc | QVQLQQSGPGLVKPSQTLSLTCAISGDSVSSNSAAWNWIRQSPSRGLE |
| | | | WLGMTYYRSKWYSVFAVSVKSRITINTDTSKNQFSLQLNSVTPEDTA |
| | | | VYYCAREGGIVGATPFDYWGQGTLVTVSSASTKGPSVFPLAPSSKSTS |
| | | | GGTAALGCLVKDYFPEPVTVSWNSGALTSGVHTFPAVLQSSGLYSLS |
| | | | SVVTVPSSSLGTQTYICNVNHKPSNTKVDKRVEPKSCDKTHTCPPCPA |
| | | | PELLGGPSVFLFPPKPKDTLMISRTPEVTCVVVDVSHEDPEVKFNWYV |
| | | | DGVEVHNAKTKPREEQYASTYRVVSVLTVLHQDWLNGKEYKCKVS |
| | | | NKALPAPIEKTISKAKGQPREPQVYTLPPSREEMTKNQVSLTCLVKGF |
| | | | YPSDIAVEWESNGQPENNYKTTPPVLDSDGSFFLYSKLTVDKSRWQQ |
| | | | GNVFSCSVMHEALHNHYTQKSLSLSPG |
| 533 | ATX-P-573 | HC IgG1 Fc | QVQLQQSGPGLVKPSQTLSLTCAISGDSVSSNSAAWNWIRQSPSRGLE |
| | | | WLGRTYYRSKLYSDYAVSVKSRITINPDTSRNQFSLQLNSVTPEDTAV |
| | | | YYCAREGGYTYGYDYWGQGTLVTVSSASTKGPSVFPLAPSSKSTSGG |
| | | | TAALGCLVKDYFPEPVTVSWNSGALTSGVHTFPAVLQSSGLYSLSSV |
| | | | VTVPSSSLGTQTYICNVNHKPSNTKVDKRVEPKSCDKTHTCPPCPAPE |
| | | | LLGGPSVFLFPPKPKDTLMISRTPEVTCVVVDVSHEDPEVKFNWYVD |
| | | | GVEVHNAKTKPREEQYASTYRVVSVLTVLHQDWLNGKEYKCKVSN |
| | | | KALPAPIEKTISKAKGQPREPQVYTLPPSREEMTKNQVSLTCLVKGFY |
| | | | PSDIAVEWESNGQPENNYKTTPPVLDSDGSFFLYSKLTVDKSRWQQG |
| | | | NVFSCSVMHEALHNHYTQKSLSLSPG |
| 534 | ATX-P-581 | HC IgG1 Fc | QVQLQQSGPGLVKPSQTLSLTCAISGDSVSSNNAAWNWIRQSPSRGLE |
| | | | WLGRTYYRSKWYNAYAVSVKSRIIINPDTSRNQFSLQLNSVTPEDTA |
| | | | VYYCAREGGYIYGLDQWGQGTLVTVSSASTKGPSVFPLAPSSKSTSG |
| | | | GTAALGCLVKDYFPEPVTVSWNSGALTSGVHTFPAVLQSSGLYSLSS |
| | | | VVTVPSSSLGTQTYICNVNHKPSNTKVDKRVEPKSCDKTHTCPPCPAP |
| | | | ELLGGPSVFLFPPKPKDTLMISRTPEVTCVVVDVSHEDPEVKFNWYV |
| | | | DGVEVHNAKTKPREEQYASTYRVVSVLTVLHQDWLNGKEYKCKVS |
| | | | NKALPAPIEKTISKAKGQPREPQVYTLPPSREEMTKNQVSLTCLVKGF |
| | | | YPSDIAVEWESNGQPENNYKTTPPVLDSDGSFFLYSKLTVDKSRWQQ |
| | | | GNVFSCSVMHEALHNHYTQKSLSLSPG |
| 535 | ATX-P-587 | HC IgG1 Fc | QVQLQQSGPGLVKPSQTLSLTCAISGDSVSSNSAAWNWIRQSPSRGLE |
| | | | WLGKTYYRSKWYNYYALSVKSRITINPDTSKNQFSLHLNSVTPEDTA |
| | | | VYYCARDGDYYLPSPFDLWGHGTMVTVSSASTKGPSVFPLAPSSKST |
| | | | SGGTAALGCLVKDYFPEPVTVSWNSGALTSGVHTFPAVLQSSGLYSL |
| | | | SSVVTVPSSSLGTQTYICNVNHKPSNTKVDKRVEPKSCDKTHTCPPCP |
| | | | APELLGGPSVFLFPPKPKDTLMISRTPEVTCVVVDVSHEDPEVKFNWY |
| | | | VDGVEVHNAKTKPREEQYASTYRVVSVLTVLHQDWLNGKEYKCKV |
| | | | SNKALPAPIEKTISKAKGQPREPQVYTLPPSREEMTKNQVSLTCLVKG |
| | | | FYPSDIAVEWESNGQPENNYKTTPPVLDSDGSFFLYSKLTVDKSRWQ |
| | | | QGNVFSCSVMHEALHNHYTQKSLSLSPG |
| 536 | ATX-P-592 | HC IgG1 Fc | QVQLQQSGPGLVKPSQTLSLTCAISGDSVSSNSAAWNWIRQSPSRGLE |
| | | | WLGRTYYRSKWYSDYPLSVKSRITINPDTSKNQFSLQLNSVTPEDTAV |
| | | | YYCARDSGIVETTPFDYWGQGTLVTVSSASTKGPSVFPLAPSSKSTSG |
| | | | GTAALGCLVKDYFPEPVTVSWNSGALTSGVHTFPAVLQSSGLYSLSS |
| | | | VVTVPSSSLGTQTYICNVNHKPSNTKVDKRVEPKSCDKTHTCPPCPAP |
| | | | ELLGGPSVFLFPPKPKDTLMISRTPEVTCVVVDVSHEDPEVKFNWYV |
| | | | DGVEVHNAKTKPREEQYASTYRVVSVLTVLHQDWLNGKEYKCKVS |
| | | | NKALPAPIEKTISKAKGQPREPQVYTLPPSREEMTKNQVSLTCLVKGF |
| | | | YPSDIAVEWESNGQPENNYKTTPPVLDSDGSFFLYSKLTVDKSRWQQ |
| | | | GNVFSCSVMHEALHNHYTQKSLSLSPG |
| 537 | ATX-P-594 | HC IgG1 Fc | QVQLQQSGPGLVKPSQTLSLTCAISGDSVSSNSASWNWIRQSPSRGLE |
| | | | WLGTTYYRSKWFNVYAVSVKSRITINPDTSKNQFSLHLNSVTPEDTAI |
| | | | YFCTRDRGDLLHWYFDLWGRGTLVTVSSASTKGPSVFPLAPSSKSTS |
| | | | GGTAALGCLVKDYFPEPVTVSWNSGALTSGVHTFPAVLQSSGLYSLS |
| | | | SVVTVPSSSLGTQTYICNVNHKPSNTKVDKRVEPKSCDKTHTCPPCPA |
| | | | PELLGGPSVFLFPPKPKDTLMISRTPEVTCVVVDVSHEDPEVKFNWYV |
| | | | DGVEVHNAKTKPREEQYASTYRVVSVLTVLHQDWLNGKEYKCKVS |
| | | | NKALPAPIEKTISKAKGQPREPQVYTLPPSREEMTKNQVSLTCLVKGF |
| | | | YPSDIAVEWESNGQPENNYKTTPPVLDSDGSFFLYSKLTVDKSRWQQ |
| | | | GNVFSCSVMHEALHNHYTQKSLSLSPG |
| 538 | ATX-P-595 | HC IgG1 Fc | QVQLQQSGPGLVKPSQTLSLTCAISGDSVSSNSAAWNWIRQSPSRGLE |
| | | | WLGRTYYRSKWFNDYALSVKSRITINPDTSKNQFSLHLNSVTPEDTA |
| | | | VYYCAREPGIVAPGPFDYWGQGTLVTVSSASTKGPSVFPLAPSSKSTS |
| | | | GGTAALGCLVKDYFPEPVTVSWNSGALTSGVHTFPAVLQSSGLYSLS |
| | | | SVVTVPSSSLGTQTYICNVNHKPSNTKVDKRVEPKSCDKTHTCPPCPA |
| | | | PELLGGPSVFLFPPKPKDTLMISRTPEVTCVVVDVSHEDPEVKFNWYV |
| | | | DGVEVHNAKTKPREEQYASTYRVVSVLTVLHQDWLNGKEYKCKVS |
| | | | NKALPAPIEKTISKAKGQPREPQVYTLPPSREEMTKNQVSLTCLVKGF |
| | | | YPSDIAVEWESNGQPENNYKTTPPVLDSDGSFFLYSKLTVDKSRWQQ |
| | | | GNVFSCSVMHEALHNHYTQKSLSLSPG |
| 539 | ATX-P-604 | HC IgG1 Fc | QVQLQQSGPGLVKPTQTLSLTCAISGDSVSSNSAAWNWIRQSPSRGLE |
| | | | WLGRTYYRSKWFNGYAVSVKSRITINPDASKNQFSLHLKSVTDEDTA |
| | | | VYYCATDRGELLHWYFDLWGRGTLVTVSSASTKGPSVFPLAPSSKST |
| | | | SGGTAALGCLVKDYFPEPVTVSWNSGALTSGVHTFPAVLQSSGLYSL |
| | | | SSVVTVPSSSLGTQTYICNVNHKPSNTKVDKRVEPKSCDKTHTCPPCP |
| | | | APELLGGPSVFLFPPKPKDTLMISRTPEVTCVVVDVSHEDPEVKFNWY |
| | | | VDGVEVHNAKTKPREEQYASTYRVVSVLTVLHQDWLNGKEYKCKV |
| | | | SNKALPAPIEKTISKAKGQPREPQVYTLPPSREEMIKNQVSLTCLVKG |
| | | | FYPSDIAVEWESNGQPENNYKTTPPVLDSDGSFFLYSKLTVDKSRWQ |
| | | | QGNVFSCSVMHEALHNHYTQKSLSLSPG |
| 540 | ATX-P-610 | HC IgG1 Fc | QVQLQQSGPGLVKSSQTLSITCAISGDSVSSNSAAWNWIRQSPSRGLE |
| | | | WLGRTYYRSKWYNDYALSVKSRIIIKSDTSKNQFSLQLNSVTPEDTAV |
| | | | YYCAREPGIAAPGPFDYWGQGSLVTVSSASTKGPSVFPLAPSSKSTSG |
| | | | GTAALGCLVKDYFPEPVTVSWNSGALTSGVHTFPAVLQSSGLYSLSS |
| | | | VVTVPSSSLGTQTYICNVNHKPSNTKVDKRVEPKSCDKTHTCPPCPAP |
| | | | ELLGGPSVFLFPPKPKDTLMISRTPEVTCVVVDVSHEDPEVKFNWYV |
| | | | DGVEVHNAKTKPREEQYASTYRVVSVLTVLHQDWLNGKEYKCKVS |
| | | | NKALPAPIEKTISKAKGQPREPQVYTLPPSREEMTKNQVSLTCLVKGF |
| | | | YPSDIAVEWESNGQPENNYKTTPPVLDSDGSFFLYSKLTVDKSRWQQ |
| | | | GNVFSCSVMHEALHNHYTQKSLSLSPG |
| 541 | ATX-P-560 | HC IgG1 Fc- | CAGGTACAGCTGCAGCAGTCAGGTCCAGGACTGGTGAAGCCCTCG |
| | | nucleotide | CAGACCCTCTCACTCACCTGTGCCATTTCCGGGGACAGTGTCTCTA |
| | | | GCAACACTGCTGCTTGGAACTGGATCAGGCAGTCCCCATCGAGAG |
| | | | GCCTTGAGTGGCTGGGAAGGACATACTACAGGTCCAAGTGGTATA |
| | | | ATGATTATGCAGTATCTGTGAAAAGTCGAATAACCATCAACCCAG |
| | | | ACACATCCAAGAACCAGTTCTCCCTGCAGTTGAGCTCTGTGACTCC |
| | | | CCAGGACACGGCTATATATTACTGTGCGAGCGATAACTGGAACAA |
| | | | CGGAGGCCCTGGGTTCGACCCCTGGGGCCAGGGAACCCTGGTCAC |
| | | | CGTCTCCTCAGCTAGCACTAAAGGGCCTTCTGTATTTCCCTTGGCC |
| | | | CCGTCCAGCAAATCGACCTCGGGAGGGACAGCCGCCCTGGGTTGC |
| | | | CTTGTGAAAGATTATTTCCCTGAGCCAGTTACCGTAAGTTGGAACA |
| | | | GTGGGGCGCTGACAAGTGGTGTGCACACGTTTCCTGCCGTCCTGCA |
| | | | ATCATCGGGCTTGTATAGCCTCAGCTCTGTGGTCACTGTCCCAAGT |
| | | | TCATCGCTGGGCACTCAGACGTATATTTGCAATGTGAACCACAAA |
| | | | CCTTCAAATACAAAAGTGGATAAACGCGTAGAACCGAAATCGTGT |
| | | | GATAAAACTCACACATGCCCGCCATGCCCGGCACCTGAACTGCTT |
| | | | GGTGGTCCCAGCGTGTTCCTGTTCCCGCCGAAGCCTAAAGATACTC |
| | | | TAATGATCAGCCGTACGCCAGAGGTGACATGTGTCGTGGTTGACG |
| | | | TGTCCCACGAAGATCCCGAAGTTAAGTTCAATTGGTATGTTGATGG |
| | | | TGTAGAGGTACACAATGCTAAGACTAAACCTCGCGAGGAGCAGTA |
| | | | CGCCTCGACCTATCGTGTCGTGAGCGTTCTGACCGTCCTTCACCAA |
| | | | GATTGGCTTAACGGCAAAGAATATAAGTGCAAGGTAAGCAATAAA |
| | | | GCACTTCCGGCCCCAATCGAGAAAACCATTTCCAAGGCCAAAGGT |
| | | | CAACCAAGAGAACCCCAGGTGTATACTCTTCCGCCTTCTCGTGAGG |
| | | | AAATGACTAAAAATCAAGTATCCCTTACGTGTCTGGTTAAAGGTTT |
| | | | TTATCCTAGCGATATTGCTGTTGAATGGGAATCGAACGGTCAGCCG |
| | | | GAGAATAATTATAAAACAACGCCACCCGTCCTGGATAGCGACGGC |
| | | | TCATTTTTTCTGTATAGCAAACTGACTGTAGATAAATCACGGTGGC |
| | | | AGCAGGGCAATGTATTCAGTTGCTCCGTTATGCATGAAGCGTTACA |
| | | | TAATCACTACACGCAGAAATCTCTTAGTCTTTCACCCGGT |
| 542 | ATX-P-561 | HC IgG1 Fc- | CAGGTACAGCTGCAGCAGTCAGGTCCAGGACTGGTGAAGCCCTCG |
| | | nucleotide | CAGACCCTCTCACTCACCTGTGCCATCTCCGGGGACAGTGTCTCTA |
| | | | GCAACAGTGCTGCTTGGAACTGGATCAGGCAGTCCCCATCGAGAG |
| | | | GCCTTGAGTGGCTGGGAAGGACATACTACAGGTCCAAGTGGTATA |
| | | | ATGGTTATGCAGTCTCTATGAAAAGTCGAATAACCATCAACCCAG |
| | | | ACACATCCAAGAACCAGTTCTCCCTGCAGCTGAACTCTGTGACTCC |
| | | | CGAGGACACGGCTATGTATTATTGTGCAAGAGAGGGAGTGGGAGC |
| | | | TACTACAGGCTTTGACTACTGGGGCCAGGGAACCCTGGTCACCGT |
| | | | CTCCTCAGCTAGCACTAAAGGGCCTTCTGTATTTCCCTTGGCCCCG |
| | | | TCCAGCAAATCGACCTCGGGAGGGACAGCCGCCCTGGGTTGCCTT |
| | | | GTGAAAGATTATTTCCCTGAGCCAGTTACCGTAAGTTGGAACAGT |
| | | | GGGGCGCTGACAAGTGGTGTGCACACGTTTCCTGCCGTCCTGCAAT |
| | | | CATCGGGCTTGTATAGCCTCAGCTCTGTGGTCACTGTCCCAAGTTC |
| | | | ATCGCTGGGCACTCAGACGTATATTTGCAATGTGAACCACAAACC |
| | | | TTCAAATACAAAAGTGGATAAACGCGTAGAACCGAAATCGTGTGA |
| | | | TAAAACTCACACATGCCCGCCATGCCCGGCACCTGAACTGCTTGGT |
| | | | GGTCCCAGCGTGTTCCTGTTCCCGCCGAAGCCTAAAGATACTCTAA |
| | | | TGATCAGCCGTACGCCAGAGGTGACATGTGTCGTGGTTGACGTGT |
| | | | CCCACGAAGATCCCGAAGTTAAGTTCAATTGGTATGTTGATGGTGT |
| | | | AGAGGTACACAATGCTAAGACTAAACCTCGCGAGGAGCAGTACGC |
| | | | CTCGACCTATCGTGTCGTGAGCGTTCTGACCGTCCTTCACCAAGAT |
| | | | TGGCTTAACGGCAAAGAATATAAGTGCAAGGTAAGCAATAAAGCA |
| | | | CTTCCGGCCCCAATCGAGAAAACCATTTCCAAGGCCAAAGGTCAA |
| | | | CCAAGAGAACCCCAGGTGTATACTCTTCCGCCTTCTCGTGAGGAA |
| | | | ATGACTAAAAATCAAGTATCCCTTACGTGTCTGGTTAAAGGTTTTT |
| | | | ATCCTAGCGATATTGCTGTTGAATGGGAATCGAACGGTCAGCCGG |
| | | | AGAATAATTATAAAACAACGCCACCCGTCCTGGATAGCGACGGCT |
| | | | CATTTTTTCTGTATAGCAAACTGACTGTAGATAAATCACGGTGGCA |
| | | | GCAGGGCAATGTATTCAGTTGCTCCGTTATGCATGAAGCGTTACAT |
| | | | AATCACTACACGCAGAAATCTCTTAGTCTTTCACCCGGT |
| 543 | ATX-P-562 | HC IgG1 Fc- | CAGGTACAGCTGCAGCAGTCAGGTCCAGGACTGGTGAAGTCCTCG |
| | | nucleotide | CAGACCCTCTCACTCACCTGTGCCATCTCCGGGGACACTGTCTCTA |
| | | | GTAATAGTGCTGCTTGGAACTGGATCAGGCAGTCCCCATCGAGAG |
| | | | GCCTTGAGTGGCTGGGAAGGACATTCTATAGGTCCAGGTGGTCTG |
| | | | CTGCTTATGCAGCGTCTGTGAGTAGTCGAATAACCATCAACCCAG |
| | | | ACACATCCAAGAACCAGTTCTCCCTGCAGCTGACCTCTGTGACTCC |
| | | | CGCGGACACGGCTGTGTATTACTGTGCAAGAGAGGGAGTAGGATC |
| | | | TTCTACAGGCTTTGACTACTGGGGCCAGGGAACCCTGGTCACCGTC |
| | | | TCCTCAGCTAGCACTAAAGGGCCTTCTGTATTTCCCTTGGCCCCGT |
| | | | CCAGCAAATCGACCTCGGGAGGGACAGCCGCCCTGGGTTGCCTTG |
| | | | TGAAAGATTATTTCCCTGAGCCAGTTACCGTAAGTTGGAACAGTG |
| | | | GGGCGCTGACAAGTGGTGTGCACACGTTTCCTGCCGTCCTGCAATC |
| | | | ATCGGGCTTGTATAGCCTCAGCTCTGTGGTCACTGTCCCAAGTTCA |
| | | | TCGCTGGGCACTCAGACGTATATTTGCAATGTGAACCACAAACCTT |
| | | | CAAATACAAAAGTGGATAAACGCGTAGAACCGAAATCGTGTGATA |
| | | | AAACTCACACATGCCCGCCATGCCCGGCACCTGAACTGCTTGGTG |
| | | | GTCCCAGCGTGTTCCTGTTCCCGCCGAAGCCTAAAGATACTCTAAT |
| | | | GATCAGCCGTACGCCAGAGGTGACATGTGTCGTGGTTGACGTGTC |
| | | | CCACGAAGATCCCGAAGTTAAGTTCAATTGGTATGTTGATGGTGTA |
| | | | GAGGTACACAATGCTAAGACTAAACCTCGCGAGGAGCAGTACGCC |
| | | | TCGACCTATCGTGTCGTGAGCGTTCTGACCGTCCTTCACCAAGATT |
| | | | GGCTTAACGGCAAAGAATATAAGTGCAAGGTAAGCAATAAAGCA |
| | | | CTTCCGGCCCCAATCGAGAAAACCATTTCCAAGGCCAAAGGTCAA |
| | | | CCAAGAGAACCCCAGGTGTATACTCTTCCGCCTTCTCGTGAGGAA |
| | | | ATGACTAAAAATCAAGTATCCCTTACGTGTCTGGTTAAAGGTTTTT |
| | | | ATCCTAGCGATATTGCTGTTGAATGGGAATCGAACGGTCAGCCGG |
| | | | AGAATAATTATAAAACAACGCCACCCGTCCTGGATAGCGACGGCT |
| | | | CATTTTTTCTGTATAGCAAACTGACTGTAGATAAATCACGGTGGCA |
| | | | GCAGGGCAATGTATTCAGTTGCTCCGTTATGCATGAAGCGTTACAT |
| | | | AATCACTACACGCAGAAATCTCTTAGTCTTTCACCCGGT |
| 544 | ATX-P-566 | HC IgG1 Fc- | CAGGTACAGCTGCAGCAGTCAGGTCCAGGACTGGTGAAGCCCTCG |
| | | nucleotide | CAGACCCTCTCACTCACCTGTGCCATCTCCGGGGACAGTGTCTCTA |
| | | | GCAACAGTGCTGCTTGGAACTGGATCAGGCAGTCCCCATCGAGAG |
| | | | GCCTTGAGTGGCTGGGAAGGACATACTACAGGTCCAAGTGGTTTA |
| | | | ATAATTATTCAGTTTCTGTGAAAAGTCGAATAGCCATTAACCCAGA |
| | | | CACATCCAAGAACCAGTTCTCCCTTCAACTGAACTCTGTGACTCCC |
| | | | GAGGACACGGCTGTGTATTACTGTGCAAGAGATCTGGGGGAGTTA |
| | | | CTTGACTGGTACTTCGATCTCTGGGGCCGTGGCACCCTGGTCACTG |
| | | | TCTCCGCAGCTAGCACTAAAGGGCCTTCTGTATTTCCCTTGGCCCC |
| | | | GTCCAGCAAATCGACCTCGGGAGGGACAGCCGCCCTGGGTTGCCT |
| | | | TGTGAAAGATTATTTCCCTGAGCCAGTTACCGTAAGTTGGAACAGT |
| | | | GGGGCGCTGACAAGTGGTGTGCACACGTTTCCTGCCGTCCTGCAAT |
| | | | CATCGGGCTTGTATAGCCTCAGCTCTGTGGTCACTGTCCCAAGTTC |
| | | | ATCGCTGGGCACTCAGACGTATATTTGCAATGTGAACCACAAACC |
| | | | TTCAAATACAAAAGTGGATAAACGCGTAGAACCGAAATCGTGTGA |
| | | | TAAAACTCACACATGCCCGCCATGCCCGGCACCTGAACTGCTTGGT |
| | | | GGTCCCAGCGTGTTCCTGTTCCCGCCGAAGCCTAAAGATACTCTAA |
| | | | TGATCAGCCGTACGCCAGAGGTGACATGTGTCGTGGTTGACGTGT |
| | | | CCCACGAAGATCCCGAAGTTAAGTTCAATTGGTATGTTGATGGTGT |
| | | | AGAGGTACACAATGCTAAGACTAAACCTCGCGAGGAGCAGTACGC |
| | | | CTCGACCTATCGTGTCGTGAGCGTTCTGACCGTCCTTCACCAAGAT |
| | | | TGGCTTAACGGCAAAGAATATAAGTGCAAGGTAAGCAATAAAGCA |
| | | | CTTCCGGCCCCAATCGAGAAAACCATTTCCAAGGCCAAAGGTCAA |
| | | | CCAAGAGAACCCCAGGTGTATACTCTTCCGCCTTCTCGTGAGGAA |
| | | | ATGACTAAAAATCAAGTATCCCTTACGTGTCTGGTTAAAGGTTTTT |
| | | | ATCCTAGCGATATTGCTGTTGAATGGGAATCGAACGGTCAGCCGG |
| | | | AGAATAATTATAAAACAACGCCACCCGTCCTGGATAGCGACGGCT |
| | | | CATTTTTTCTGTATAGCAAACTGACTGTAGATAAATCACGGTGGCA |
| | | | GCAGGGCAATGTATTCAGTTGCTCCGTTATGCATGAAGCGTTACAT |
| | | | AATCACTACACGCAGAAATCTCTTAGTCTTTCACCCGGT |
| 545 | ATX-P-572 | HC IgG1 Fc- | CAGGTACAGCTGCAGCAGTCAGGTCCAGGACTGGTGAAGCCCTCG |
| | | nucleotide | CAGACCCTCTCACTCACCTGTGCCATCTCCGGGGACAGTGTCTCTA |
| | | | GCAACAGTGCTGCTTGGAACTGGATCAGGCAGTCCCCATCGAGAG |
| | | | GCCTTGAGTGGCTGGGAATGACATACTACAGGTCCAAGTGGTATA |
| | | | GTGTTTTTGCAGTATCTGTGAAAAGTCGAATAACCATCAATACAGA |
| | | | CACATCCAAGAACCAGTTCTCCCTGCAGCTGAACTCTGTGACTCCC |
| | | | GAGGACACGGCTGTGTATTACTGTGCAAGAGAGGGGGGTATAGTG |
| | | | GGAGCCACCCCCTTTGACTACTGGGGCCAGGGAACCCTGGTCACC |
| | | | GTCTCTTCAGCTAGCACTAAAGGGCCTTCTGTATTTCCCTTGGCCC |
| | | | CGTCCAGCAAATCGACCTCGGGAGGGACAGCCGCCCTGGGTTGCC |
| | | | TTGTGAAAGATTATTTCCCTGAGCCAGTTACCGTAAGTTGGAACAG |
| | | | TGGGGCGCTGACAAGTGGTGTGCACACGTTTCCTGCCGTCCTGCAA |
| | | | TCATCGGGCTTGTATAGCCTCAGCTCTGTGGTCACTGTCCCAAGTT |
| | | | CATCGCTGGGCACTCAGACGTATATTTGCAATGTGAACCACAAAC |
| | | | CTTCAAATACAAAAGTGGATAAACGCGTAGAACCGAAATCGTGTG |
| | | | ATAAAACTCACACATGCCCGCCATGCCCGGCACCTGAACTGCTTG |
| | | | GTGGTCCCAGCGTGTTCCTGTTCCCGCCGAAGCCTAAAGATACTCT |
| | | | AATGATCAGCCGTACGCCAGAGGTGACATGTGTCGTGGTTGACGT |
| | | | GTCCCACGAAGATCCCGAAGTTAAGTTCAATTGGTATGTTGATGGT |
| | | | GTAGAGGTACACAATGCTAAGACTAAACCTCGCGAGGAGCAGTAC |
| | | | GCCTCGACCTATCGTGTCGTGAGCGTTCTGACCGTCCTTCACCAAG |
| | | | ATTGGCTTAACGGCAAAGAATATAAGTGCAAGGTAAGCAATAAAG |
| | | | CACTTCCGGCCCCAATCGAGAAAACCATTTCCAAGGCCAAAGGTC |
| | | | AACCAAGAGAACCCCAGGTGTATACTCTTCCGCCTTCTCGTGAGG |
| | | | AAATGACTAAAAATCAAGTATCCCTTACGTGTCTGGTTAAAGGTTT |
| | | | TTATCCTAGCGATATTGCTGTTGAATGGGAATCGAACGGTCAGCCG |
| | | | GAGAATAATTATAAAACAACGCCACCCGTCCTGGATAGCGACGGC |
| | | | TCATTTTTTCTGTATAGCAAACTGACTGTAGATAAATCACGGTGGC |
| | | | AGCAGGGCAATGTATTCAGTTGCTCCGTTATGCATGAAGCGTTACA |
| | | | TAATCACTACACGCAGAAATCTCTTAGTCTTTCACCCGGT |
| 546 | ATX-P-573 | HC IgG1 Fc- | CAGGTACAGCTGCAGCAGTCAGGTCCAGGACTGGTGAAGCCCTCG |
| | | nucleotide | CAGACCCTCTCACTCACCTGTGCCATCTCCGGGGACAGTGTCTCTA |
| | | | GCAACAGTGCTGCTTGGAACTGGATCAGGCAGTCCCCATCGAGAG |
| | | | GCCTTGAGTGGCTGGGCAGGACATACTACAGGTCCAAGTTGTATA |
| | | | GTGATTATGCAGTATCTGTGAAAAGTCGAATAACCATCAACCCAG |
| | | | ACACATCCAGGAACCAGTTCTCCCTGCAGCTGAACTCTGTGACTCC |
| | | | CGAGGACACGGCTGTGTATTACTGTGCAAGAGAGGGGGGATACAC |
| | | | CTATGGTTATGACTACTGGGGCCAGGGAACCCTGGTCACCGTCTCC |
| | | | TCAGCTAGCACTAAAGGGCCTTCTGTATTTCCCTTGGCCCCGTCCA |
| | | | GCAAATCGACCTCGGGAGGGACAGCCGCCCTGGGTTGCCTTGTGA |
| | | | AAGATTATTTCCCTGAGCCAGTTACCGTAAGTTGGAACAGTGGGG |
| | | | CGCTGACAAGTGGTGTGCACACGTTTCCTGCCGTCCTGCAATCATC |
| | | | GGGCTTGTATAGCCTCAGCTCTGTGGTCACTGTCCCAAGTTCATCG |
| | | | CTGGGCACTCAGACGTATATTTGCAATGTGAACCACAAACCTTCA |
| | | | AATACAAAAGTGGATAAACGCGTAGAACCGAAATCGTGTGATAAA |
| | | | ACTCACACATGCCCGCCATGCCCGGCACCTGAACTGCTTGGTGGTC |
| | | | CCAGCGTGTTCCTGTTCCCGCCGAAGCCTAAAGATACTCTAATGAT |
| | | | CAGCCGTACGCCAGAGGTGACATGTGTCGTGGTTGACGTGTCCCA |
| | | | CGAAGATCCCGAAGTTAAGTTCAATTGGTATGTTGATGGTGTAGA |
| | | | GGTACACAATGCTAAGACTAAACCTCGCGAGGAGCAGTACGCCTC |
| | | | GACCTATCGTGTCGTGAGCGTTCTGACCGTCCTTCACCAAGATTGG |
| | | | CTTAACGGCAAAGAATATAAGTGCAAGGTAAGCAATAAAGCACTT |
| | | | CCGGCCCCAATCGAGAAAACCATTTCCAAGGCCAAAGGTCAACCA |
| | | | AGAGAACCCCAGGTGTATACTCTTCCGCCTTCTCGTGAGGAAATG |
| | | | ACTAAAAATCAAGTATCCCTTACGTGTCTGGTTAAAGGTTTTTATC |
| | | | CTAGCGATATTGCTGTTGAATGGGAATCGAACGGTCAGCCGGAGA |
| | | | ATAATTATAAAACAACGCCACCCGTCCTGGATAGCGACGGCTCAT |
| | | | TTTTTCTGTATAGCAAACTGACTGTAGATAAATCACGGTGGCAGCA |
| | | | GGGCAATGTATTCAGTTGCTCCGTTATGCATGAAGCGTTACATAAT |
| | | | CACTACACGCAGAAATCTCTTAGTCTTTCACCCGGT |
| 547 | ATX-P-581 | HC IgG1 Fc- | CAGGTACAGCTGCAGCAGTCAGGTCCAGGACTGGTGAAGCCCTCG |
| | | nucleotide | CAGACCCTCTCACTCACCTGTGCCATCTCCGGGGACAGTGTCTCTA |
| | | | GCAACAATGCTGCTTGGAACTGGATCAGGCAGTCCCCATCGAGAG |
| | | | GCCTTGAGTGGCTGGGAAGGACGTACTACAGGTCCAAGTGGTATA |
| | | | ATGCTTATGCAGTTTCTGTGAAAAGTCGAATTATCATCAATCCAGA |
| | | | CACATCCAGGAACCAGTTCTCCCTGCAACTGAACTCTGTGACTCCC |
| | | | GAGGACACGGCTGTGTATTACTGTGCAAGAGAGGGTGGATACATC |
| | | | TATGGTCTTGACCAATGGGGCCAGGGAACCCTGGTCACCGTCTCCT |
| | | | CAGCTAGCACTAAAGGGCCTTCTGTATTTCCCTTGGCCCCGTCCAG |
| | | | CAAATCGACCTCGGGAGGGACAGCCGCCCTGGGTTGCCTTGTGAA |
| | | | AGATTATTTCCCTGAGCCAGTTACCGTAAGTTGGAACAGTGGGGC |
| | | | GCTGACAAGTGGTGTGCACACGTTTCCTGCCGTCCTGCAATCATCG |
| | | | GGCTTGTATAGCCTCAGCTCTGTGGTCACTGTCCCAAGTTCATCGC |
| | | | TGGGCACTCAGACGTATATTTGCAATGTGAACCACAAACCTTCAA |
| | | | ATACAAAAGTGGATAAACGCGTAGAACCGAAATCGTGTGATAAAA |
| | | | CTCACACATGCCCGCCATGCCCGGCACCTGAACTGCTTGGTGGTCC |
| | | | CAGCGTGTTCCTGTTCCCGCCGAAGCCTAAAGATACTCTAATGATC |
| | | | AGCCGTACGCCAGAGGTGACATGTGTCGTGGTTGACGTGTCCCAC |
| | | | GAAGATCCCGAAGTTAAGTTCAATTGGTATGTTGATGGTGTAGAG |
| | | | GTACACAATGCTAAGACTAAACCTCGCGAGGAGCAGTACGCCTCG |
| | | | ACCTATCGTGTCGTGAGCGTTCTGACCGTCCTTCACCAAGATTGGC |
| | | | TTAACGGCAAAGAATATAAGTGCAAGGTAAGCAATAAAGCACTTC |
| | | | CGGCCCCAATCGAGAAAACCATTTCCAAGGCCAAAGGTCAACCAA |
| | | | GAGAACCCCAGGTGTATACTCTTCCGCCTTCTCGTGAGGAAATGAC |
| | | | TAAAAATCAAGTATCCCTTACGTGTCTGGTTAAAGGTTTTTATCCT |
| | | | AGCGATATTGCTGTTGAATGGGAATCGAACGGTCAGCCGGAGAAT |
| | | | AATTATAAAACAACGCCACCCGTCCTGGATAGCGACGGCTCATTTT |
| | | | TTCTGTATAGCAAACTGACTGTAGATAAATCACGGTGGCAGCAGG |
| | | | GCAATGTATTCAGTTGCTCCGTTATGCATGAAGCGTTACATAATCA |
| | | | CTACACGCAGAAATCTCTTAGTCTTTCACCCGGT |
| 548 | ATX-P-587 | HC IgG1 Fc- | CAGGTGCAGCTGCAGCAGTCGGGTCCAGGACTGGTGAAGCCCTCG |
| | | nucleotide | CAGACCCTCTCACTCACCTGTGCCATCTCCGGGGACAGTGTCTCTA |
| | | | GCAACAGTGCTGCTTGGAACTGGATCAGGCAGTCCCCATCGAGAG |
| | | | GCCTTGAGTGGCTGGGAAAGACATACTACAGGTCCAAGTGGTATA |
| | | | ATTATTATGCACTATCTGTGAAAAGTCGAATAACCATCAACCCAG |
| | | | ACACATCCAAGAACCAGTTCTCCCTGCACCTGAACTCTGTGACTCC |
| | | | CGAGGACACGGCTGTGTATTACTGTGCAAGAGACGGTGACTACTA |
| | | | CCTTCCCTCTCCTTTTGATCTCTGGGGCCACGGGACAATGGTCACC |
| | | | GTCTCCTCAGCTAGCACTAAAGGGCCTTCTGTATTTCCCTTGGCCC |
| | | | CGTCCAGCAAATCGACCTCGGGAGGGACAGCCGCCCTGGGTTGCC |
| | | | TTGTGAAAGATTATTTCCCTGAGCCAGTTACCGTAAGTTGGAACAG |
| | | | TGGGGCGCTGACAAGTGGTGTGCACACGTTTCCTGCCGTCCTGCAA |
| | | | TCATCGGGCTTGTATAGCCTCAGCTCTGTGGTCACTGTCCCAAGTT |
| | | | CATCGCTGGGCACTCAGACGTATATTTGCAATGTGAACCACAAAC |
| | | | CTTCAAATACAAAAGTGGATAAACGCGTAGAACCGAAATCGTGTG |
| | | | ATAAAACTCACACATGCCCGCCATGCCCGGCACCTGAACTGCTTG |
| | | | GTGGTCCCAGCGTGTTCCTGTTCCCGCCGAAGCCTAAAGATACTCT |
| | | | AATGATCAGCCGTACGCCAGAGGTGACATGTGTCGTGGTTGACGT |
| | | | GTCCCACGAAGATCCCGAAGTTAAGTTCAATTGGTATGTTGATGGT |
| | | | GTAGAGGTACACAATGCTAAGACTAAACCTCGCGAGGAGCAGTAC |
| | | | GCCTCGACCTATCGTGTCGTGAGCGTTCTGACCGTCCTTCACCAAG |
| | | | ATTGGCTTAACGGCAAAGAATATAAGTGCAAGGTAAGCAATAAAG |
| | | | CACTTCCGGCCCCAATCGAGAAAACCATTTCCAAGGCCAAAGGTC |
| | | | AACCAAGAGAACCCCAGGTGTATACTCTTCCGCCTTCTCGTGAGG |
| | | | AAATGACTAAAAATCAAGTATCCCTTACGTGTCTGGTTAAAGGTTT |
| | | | TTATCCTAGCGATATTGCTGTTGAATGGGAATCGAACGGTCAGCCG |
| | | | GAGAATAATTATAAAACAACGCCACCCGTCCTGGATAGCGACGGC |
| | | | TCATTTTTTCTGTATAGCAAACTGACTGTAGATAAATCACGGTGGC |
| | | | AGCAGGGCAATGTATTCAGTTGCTCCGTTATGCATGAAGCGTTACA |
| | | | TAATCACTACACGCAGAAATCTCTTAGTCTTTCACCCGGT |
| 549 | ATX-P-592 | HC IgG1 Fc- | CAGGTACAGCTGCAGCAGTCAGGTCCAGGACTGGTGAAGCCCTCG |
| | | nucleotide | CAGACCCTCTCACTCACCTGTGCCATCTCCGGGGACAGTGTCTCTA |
| | | | GCAACAGTGCTGCTTGGAACTGGATCAGGCAGTCCCCATCGAGAG |
| | | | GCCTTGAGTGGCTGGGAAGGACATACTACAGGTCCAAGTGGTATA |
| | | | GTGATTATCCACTATCTGTGAAAAGTCGAATAACCATCAACCCCG |
| | | | ACACATCCAAGAACCAGTTCTCCCTGCAGCTGAACTCTGTGACTCC |
| | | | CGAGGACACGGCTGTGTATTACTGTGCAAGAGACTCCGGTATAGT |
| | | | TGAAACCACGCCCTTTGACTATTGGGGCCAGGGAACCCTGGTCAC |
| | | | CGTCTCCTCAGCTAGCACTAAAGGGCCTTCTGTATTTCCCTTGGCC |
| | | | CCGTCCAGCAAATCGACCTCGGGAGGGACAGCCGCCCTGGGTTGC |
| | | | CTTGTGAAAGATTATTTCCCTGAGCCAGTTACCGTAAGTTGGAACA |
| | | | GTGGGGCGCTGACAAGTGGTGTGCACACGTTTCCTGCCGTCCTGCA |
| | | | ATCATCGGGCTTGTATAGCCTCAGCTCTGTGGTCACTGTCCCAAGT |
| | | | TCATCGCTGGGCACTCAGACGTATATTTGCAATGTGAACCACAAA |
| | | | CCTTCAAATACAAAAGTGGATAAACGCGTAGAACCGAAATCGTGT |
| | | | GATAAAACTCACACATGCCCGCCATGCCCGGCACCTGAACTGCTT |
| | | | GGTGGTCCCAGCGTGTTCCTGTTCCCGCCGAAGCCTAAAGATACTC |
| | | | TAATGATCAGCCGTACGCCAGAGGTGACATGTGTCGTGGTTGACG |
| | | | TGTCCCACGAAGATCCCGAAGTTAAGTTCAATTGGTATGTTGATGG |
| | | | TGTAGAGGTACACAATGCTAAGACTAAACCTCGCGAGGAGCAGTA |
| | | | CGCCTCGACCTATCGTGTCGTGAGCGTTCTGACCGTCCTTCACCAA |
| | | | GATTGGCTTAACGGCAAAGAATATAAGTGCAAGGTAAGCAATAAA |
| | | | GCACTTCCGGCCCCAATCGAGAAAACCATTTCCAAGGCCAAAGGT |
| | | | CAACCAAGAGAACCCCAGGTGTATACTCTTCCGCCTTCTCGTGAGG |
| | | | AAATGACTAAAAATCAAGTATCCCTTACGTGTCTGGTTAAAGGTTT |
| | | | TTATCCTAGCGATATTGCTGTTGAATGGGAATCGAACGGTCAGCCG |
| | | | GAGAATAATTATAAAACAACGCCACCCGTCCTGGATAGCGACGGC |
| | | | TCATTTTTTCTGTATAGCAAACTGACTGTAGATAAATCACGGTGGC |
| | | | AGCAGGGCAATGTATTCAGTTGCTCCGTTATGCATGAAGCGTTACA |
| | | | TAATCACTACACGCAGAAATCTCTTAGTCTTTCACCCGGT |
| 550 | ATX-P-594 | HC IgG1 Fc- | CAGGTACAGCTGCAGCAGTCAGGTCCAGGACTGGTGAAGCCCTCG |
| | | nucleotide | CAGACCCTCTCACTCACCTGTGCCATCTCCGGGGACAGTGTCTCTA |
| | | | GTAACAGTGCTTCTTGGAACTGGATCAGGCAGTCCCCTTCGAGAG |
| | | | GCCTTGAGTGGCTGGGAACGACATACTACAGGTCCAAGTGGTTTA |
| | | | ATGTTTATGCAGTCTCTGTGAAAAGTCGAATAACCATCAACCCAG |
| | | | ACACATCCAAGAACCAATTCTCCCTGCACCTGAACTCTGTGACTCC |
| | | | CGAGGACACGGCTATATATTTCTGTACAAGAGATCGGGGGGACCT |
| | | | ACTCCACTGGTACTTCGATCTCTGGGGCCGTGGCACCCTGGTCACT |
| | | | GTCTCCTCAGCTAGCACTAAAGGGCCTTCTGTATTTCCCTTGGCCC |
| | | | CGTCCAGCAAATCGACCTCGGGAGGGACAGCCGCCCTGGGTTGCC |
| | | | TTGTGAAAGATTATTTCCCTGAGCCAGTTACCGTAAGTTGGAACAG |
| | | | TGGGGCGCTGACAAGTGGTGTGCACACGTTTCCTGCCGTCCTGCAA |
| | | | TCATCGGGCTTGTATAGCCTCAGCTCTGTGGTCACTGTCCCAAGTT |
| | | | CATCGCTGGGCACTCAGACGTATATTTGCAATGTGAACCACAAAC |
| | | | CTTCAAATACAAAAGTGGATAAACGCGTAGAACCGAAATCGTGTG |
| | | | ATAAAACTCACACATGCCCGCCATGCCCGGCACCTGAACTGCTTG |
| | | | GTGGTCCCAGCGTGTTCCTGTTCCCGCCGAAGCCTAAAGATACTCT |
| | | | AATGATCAGCCGTACGCCAGAGGTGACATGTGTCGTGGTTGACGT |
| | | | GTCCCACGAAGATCCCGAAGTTAAGTTCAATTGGTATGTTGATGGT |
| | | | GTAGAGGTACACAATGCTAAGACTAAACCTCGCGAGGAGCAGTAC |
| | | | GCCTCGACCTATCGTGTCGTGAGCGTTCTGACCGTCCTTCACCAAG |
| | | | ATTGGCTTAACGGCAAAGAATATAAGTGCAAGGTAAGCAATAAAG |
| | | | CACTTCCGGCCCCAATCGAGAAAACCATTTCCAAGGCCAAAGGTC |
| | | | AACCAAGAGAACCCCAGGTGTATACTCTTCCGCCTTCTCGTGAGG |
| | | | AAATGACTAAAAATCAAGTATCCCTTACGTGTCTGGTTAAAGGTTT |
| | | | TTATCCTAGCGATATTGCTGTTGAATGGGAATCGAACGGTCAGCCG |
| | | | GAGAATAATTATAAAACAACGCCACCCGTCCTGGATAGCGACGGC |
| | | | TCATTTTTTCTGTATAGCAAACTGACTGTAGATAAATCACGGTGGC |
| | | | AGCAGGGCAATGTATTCAGTTGCTCCGTTATGCATGAAGCGTTACA |
| | | | TAATCACTACACGCAGAAATCTCTTAGTCTTTCACCCGGT |
| 551 | ATX-P-595 | HC IgG1 Fc- | CAGGTACAGCTGCAGCAGTCGGGTCCAGGACTGGTGAAGCCCTCG |
| | | nucleotide | CAGACCCTCTCACTCACCTGTGCCATCTCCGGGGACAGTGTCTCTA |
| | | | GCAACAGTGCTGCTTGGAACTGGATCAGGCAGTCCCCATCGAGAG |
| | | | GCCTTGAGTGGCTGGGAAGGACATACTACAGGTCCAAGTGGTTTA |
| | | | ATGATTATGCACTATCTGTGAAAAGTCGAATAACCATCAACCCAG |
| | | | ACACATCCAAGAACCAGTTCTCCCTGCACCTGAACTCTGTGACTCC |
| | | | CGAGGACACGGCTGTGTATTACTGTGCAAGAGAACCTGGTATAGT |
| | | | AGCACCTGGCCCTTTTGACTACTGGGGCCAGGGAACCCTGGTCAC |
| | | | CGTCTCCTCAGCTAGCACTAAAGGGCCTTCTGTATTTCCCTTGGCC |
| | | | CCGTCCAGCAAATCGACCTCGGGAGGGACAGCCGCCCTGGGTTGC |
| | | | CTTGTGAAAGATTATTTCCCTGAGCCAGTTACCGTAAGTTGGAACA |
| | | | GTGGGGCGCTGACAAGTGGTGTGCACACGTTTCCTGCCGTCCTGCA |
| | | | ATCATCGGGCTTGTATAGCCTCAGCTCTGTGGTCACTGTCCCAAGT |
| | | | TCATCGCTGGGCACTCAGACGTATATTTGCAATGTGAACCACAAA |
| | | | CCTTCAAATACAAAAGTGGATAAACGCGTAGAACCGAAATCGTGT |
| | | | GATAAAACTCACACATGCCCGCCATGCCCGGCACCTGAACTGCTT |
| | | | GGTGGTCCCAGCGTGTTCCTGTTCCCGCCGAAGCCTAAAGATACTC |
| | | | TAATGATCAGCCGTACGCCAGAGGTGACATGTGTCGTGGTTGACG |
| | | | TGTCCCACGAAGATCCCGAAGTTAAGTTCAATTGGTATGTTGATGG |
| | | | TGTAGAGGTACACAATGCTAAGACTAAACCTCGCGAGGAGCAGTA |
| | | | CGCCTCGACCTATCGTGTCGTGAGCGTTCTGACCGTCCTTCACCAA |
| | | | GATTGGCTTAACGGCAAAGAATATAAGTGCAAGGTAAGCAATAAA |
| | | | GCACTTCCGGCCCCAATCGAGAAAACCATTTCCAAGGCCAAAGGT |
| | | | CAACCAAGAGAACCCCAGGTGTATACTCTTCCGCCTTCTCGTGAGG |
| | | | AAATGACTAAAAATCAAGTATCCCTTACGTGTCTGGTTAAAGGTTT |
| | | | TTATCCTAGCGATATTGCTGTTGAATGGGAATCGAACGGTCAGCCG |
| | | | GAGAATAATTATAAAACAACGCCACCCGTCCTGGATAGCGACGGC |
| | | | TCATTTTTTCTGTATAGCAAACTGACTGTAGATAAATCACGGTGGC |
| | | | AGCAGGGCAATGTATTCAGTTGCTCCGTTATGCATGAAGCGTTACA |
| | | | TAATCACTACACGCAGAAATCTCTTAGTCTTTCACCCGGT |
| 552 | ATX-P-604 | HC IgG1 Fc- | CAGGTACAGCTGCAGCAGTCAGGTCCAGGACTGGTGAAGCCCACG |
| | | nucleotide | CAGACCCTCTCACTCACCTGTGCCATCTCCGGGGACAGTGTCTCTA |
| | | | GCAACAGTGCTGCATGGAACTGGATCAGGCAGTCCCCATCGAGAG |
| | | | GCCTTGAGTGGCTGGGGAGGACATACTACAGGTCCAAGTGGTTTA |
| | | | ATGGTTATGCAGTATCTGTGAAAAGTCGAATAACCATCAACCCCG |
| | | | ACGCATCCAAGAACCAGTTCTCCCTGCACTTGAAGTCTGTGACTGA |
| | | | CGAGGACACGGCTGTATATTACTGTGCAACAGATCGGGGGGAACT |
| | | | CCTCCACTGGTACTTCGATCTCTGGGGCCGTGGCACCCTGGTCACC |
| | | | GTCTCTTCAGCTAGCACTAAAGGGCCTTCTGTATTTCCCTTGGCCC |
| | | | CGTCCAGCAAATCGACCTCGGGAGGGACAGCCGCCCTGGGTTGCC |
| | | | TTGTGAAAGATTATTTCCCTGAGCCAGTTACCGTAAGTTGGAACAG |
| | | | TGGGGCGCTGACAAGTGGTGTGCACACGTTTCCTGCCGTCCTGCAA |
| | | | TCATCGGGCTTGTATAGCCTCAGCTCTGTGGTCACTGTCCCAAGTT |
| | | | CATCGCTGGGCACTCAGACGTATATTTGCAATGTGAACCACAAAC |
| | | | CTTCAAATACAAAAGTGGATAAACGCGTAGAACCGAAATCGTGTG |
| | | | ATAAAACTCACACATGCCCGCCATGCCCGGCACCTGAACTGCTTG |
| | | | GTGGTCCCAGCGTGTTCCTGTTCCCGCCGAAGCCTAAAGATACTCT |
| | | | AATGATCAGCCGTACGCCAGAGGTGACATGTGTCGTGGTTGACGT |
| | | | GTCCCACGAAGATCCCGAAGTTAAGTTCAATTGGTATGTTGATGGT |
| | | | GTAGAGGTACACAATGCTAAGACTAAACCTCGCGAGGAGCAGTAC |
| | | | GCCTCGACCTATCGTGTCGTGAGCGTTCTGACCGTCCTTCACCAAG |
| | | | ATTGGCTTAACGGCAAAGAATATAAGTGCAAGGTAAGCAATAAAG |
| | | | CACTTCCGGCCCCAATCGAGAAAACCATTTCCAAGGCCAAAGGTC |
| | | | AACCAAGAGAACCCCAGGTGTATACTCTTCCGCCTTCTCGTGAGG |
| | | | AAATGACTAAAAATCAAGTATCCCTTACGTGTCTGGTTAAAGGTTT |
| | | | TTATCCTAGCGATATTGCTGTTGAATGGGAATCGAACGGTCAGCCG |
| | | | GAGAATAATTATAAAACAACGCCACCCGTCCTGGATAGCGACGGC |
| | | | TCATTTTTTCTGTATAGCAAACTGACTGTAGATAAATCACGGTGGC |
| | | | AGCAGGGCAATGTATTCAGTTGCTCCGTTATGCATGAAGCGTTACA |
| | | | TAATCACTACACGCAGAAATCTCTTAGTCTTTCACCCGGT |
| 553 | ATX-P-610 | HC IgG1 Fc- | CAGGTACAGCTGCAGCAGTCAGGTCCAGGACTGGTGAAGTCCTCG |
| | | nucleotide | CAGACCCTCTCAATCACCTGTGCCATCTCCGGGGACAGTGTCTCTA |
| | | | GCAACAGTGCTGCTTGGAACTGGATCAGGCAGTCCCCATCGAGAG |
| | | | GCCTTGAGTGGCTGGGAAGGACATACTACAGGTCCAAGTGGTATA |
| | | | ATGATTATGCACTATCTGTGAAAAGTCGAATAATCATCAAGTCAG |
| | | | ACACATCCAAGAACCAGTTCTCCCTGCAGTTGAACTCTGTGACTCC |
| | | | CGAGGACACGGCTGTGTACTACTGTGCAAGAGAACCGGGTATAGC |
| | | | AGCACCTGGTCCATTTGACTACTGGGGCCAGGGATCCCTGGTCACC |
| | | | GTCTCCTCAGCTAGCACTAAAGGGCCTTCTGTATTTCCCTTGGCCC |
| | | | CGTCCAGCAAATCGACCTCGGGAGGGACAGCCGCCCTGGGTTGCC |
| | | | TTGTGAAAGATTATTTCCCTGAGCCAGTTACCGTAAGTTGGAACAG |
| | | | TGGGGCGCTGACAAGTGGTGTGCACACGTTTCCTGCCGTCCTGCAA |
| | | | TCATCGGGCTTGTATAGCCTCAGCTCTGTGGTCACTGTCCCAAGTT |
| | | | CATCGCTGGGCACTCAGACGTATATTTGCAATGTGAACCACAAAC |
| | | | CTTCAAATACAAAAGTGGATAAACGCGTAGAACCGAAATCGTGTG |
| | | | ATAAAACTCACACATGCCCGCCATGCCCGGCACCTGAACTGCTTG |
| | | | GTGGTCCCAGCGTGTTCCTGTTCCCGCCGAAGCCTAAAGATACTCT |
| | | | AATGATCAGCCGTACGCCAGAGGTGACATGTGTCGTGGTTGACGT |
| | | | GTCCCACGAAGATCCCGAAGTTAAGTTCAATTGGTATGTTGATGGT |
| | | | GTAGAGGTACACAATGCTAAGACTAAACCTCGCGAGGAGCAGTAC |
| | | | GCCTCGACCTATCGTGTCGTGAGCGTTCTGACCGTCCTTCACCAAG |
| | | | ATTGGCTTAACGGCAAAGAATATAAGTGCAAGGTAAGCAATAAAG |
| | | | CACTTCCGGCCCCAATCGAGAAAACCATTTCCAAGGCCAAAGGTC |
| | | | AACCAAGAGAACCCCAGGTGTATACTCTTCCGCCTTCTCGTGAGG |
| | | | AAATGACTAAAAATCAAGTATCCCTTACGTGTCTGGTTAAAGGTTT |
| | | | TTATCCTAGCGATATTGCTGTTGAATGGGAATCGAACGGTCAGCCG |
| | | | GAGAATAATTATAAAACAACGCCACCCGTCCTGGATAGCGACGGC |
| | | | TCATTTTTTCTGTATAGCAAACTGACTGTAGATAAATCACGGTGGC |
| | | | AGCAGGGCAATGTATTCAGTTGCTCCGTTATGCATGAAGCGTTACA |
| | | | TAATCACTACACGCAGAAATCTCTTAGTCTTTCACCCGGT |
| 554 | ATX-P-560 | LC Kappa | DIQMTQSPSSVSTSVGDRVTITCRASQGISSWLAWYQQKPGKAPKLLI |
| | | | SAASSLQSGVPSRFSGSGSGTDFTLTISTLQPEDFASYYCQQANSFPPTF |
| | | | GQGTRVEIKRTVAAPSVFIFPPSDEQLKSGTASVVCLLNNFYPREAKV |
| | | | QWKVDNALQSGNSQESVTEQDSKDSTYSLSSTLTLSKADYEKHKVY |
| | | | ACEVTHQGLSSPVTKSFNRGEC |
| 555 | ATX-P-561 | LC Kappa | DIQMTQSPSSLSASVGDRVTITCRASQGISSWLTWYQQKPGKAPKLLI |
| | | | YAASSLQGGVPSRFSGSGSGTDFTLTISSLQPEDFATYYCQQANSFPPT |
| | | | FGQGTKVEIKRTVAAPSVFIFPPSDEQLKSGTASVVCLLNNFYPREAK |
| | | | VQWKVDNALQSGNSQESVTEQDSKDSTYSLSSTLTLSKADYEKHKV |
| | | | YACEVTHQGLSSPVTKSFNRGEC |
| 556 | ATX-P-562 | LC Kappa | DIQMTQSPSSVSASIGDRVTITCRASKGISIWLAWYQQKPGKAPKVLIS |
| | | | AASSLQSGAPSRFSGSGSGTDFTLTISSLQPEDFATYYCQQANSFPPTF |
| | | | GQGTKVEIKRTVAAPSVFIFPPSDEQLKSGTASVVCLLNNFYPREAKV |
| | | | QWKVDNALQSGNSQESVTEQDSKDSTYSLSSTLTLSKADYEKHKVY |
| | | | ACEVTHQGLSSPVTKSFNRGEC |
| 557 | ATX-P-566 | LC Kappa | EIVLTQSPGTLSLSPGDRATLSCRASQSVRNSYVAWYQQKPGQAPRLL |
| | | | IYGASSRATGIPDRFSGSGSGTDFSLTIGRLEPEDFVVYYCQQYGNSPL |
| | | | TFGGGTKVEIKRTVAAPSVFIFPPSDEQLKSGTASVVCLLNNFYPREA |
| | | | KVQWKVDNALQSGNSQESVTEQDSKDSTYSLSSTLTLSKADYEKHK |
| | | | VYACEVTHQGLSSPVTKSFNRGEC |
| 558 | ATX-P-572 | LC Kappa | DIVMTQSPDSLAVSLGERATINCKSSQSVLYSSNNKNYLAWYQQKPG |
| | | | QPPKLLIYWASPRESGVPDRFSGSGSGTDFTLTISSLQAEDVAVYYCQ |
| | | | QYYSIPRTFGQGTKVEIKRTVAAPSVFIFPPSDEQLKSGTASVVCLLNN |
| | | | FYPREAKVQWKVDNALQSGNSQESVTEQDSKDSTYSLSSTLTLSKAD |
| | | | YEKHKVYACEVTHQGLSSPVTKSFNRGEC |
| 559 | ATX-P-573 | LC Kappa | DIQMTQSPSSVSASVGDRVTITCRASQGISSWLAWYQQKPGKAPKVLI |
| | | | YAASSLQSGVPSRFSGSGSGTDFTLTISSLQPEDFATYYCQQANSFPPT |
| | | | FGPGTKVDIKRTVAAPSVFIFPPSDEQLKSGTASVVCLLNNFYPREAK |
| | | | VQWKVDNALQSGNSQESVTEQDSKDSTYSLSSTLTLSKADYEKHKV |
| | | | YACEVTHQGLSSPVTKSFNRGEC |
| 560 | ATX-P-581 | LC Kappa | DIQMTQSPSSVSASVGDRVTITCRASQGVNNWLAWYQQKPGKAPKL |
| | | | LIHAASSLLSGVPSRFSGSGSGTDFTLTITSLQPEDFATYYCQQANSFPI |
| | | | TFGQGTRLEIKRTVAAPSVFIFPPSDEQLKSGTASVVCLLNNFYPREAK |
| | | | VQWKVDNALQSGNSQESVTEQDSKDSTYSLSSTLTLSKADYEKHKV |
| | | | YACEVTHQGLSSPVTKSFNRGEC |
| 561 | ATX-P-587 | LC Kappa | DIVMTQSPDSLAVSLGERATINCKSSQSVLYSSNNKNYLAWYQQKPG |
| | | | QPPKLLIYWASTRESGVPDRFSGSGSGTDFTLTISSLQAEDVAVYYCQ |
| | | | QYYSTPYTFGQGTKLEIKRTVAAPSVFIFPPSDEQLKSGTASVVCLLNN |
| | | | FYPREAKVQWKVDNALQSGNSQESVTEQDSKDSTYSLSSTLTLSKAD |
| | | | YEKHKVYACEVTHQGLSSPVTKSFNRGEC |
| 562 | ATX-P-592 | LC Kappa | DIVMTQSPDSLAVSLGERATINCKSSQSVLYSSNNKNYLAWYQQKPG |
| | | | QPPKLLIYWASNRESGVPDRFSGSGSGTDFTLTISSLQAEDVAVYYCQ |
| | | | QYYSTPYTFGQGTKLEIKRTVAAPSVFIFPPSDEQLKSGTASVVCLLNN |
| | | | FYPREAKVQWKVDNALQSGNSQESVTEQDSKDSTYSLSSTLTLSKAD |
| | | | YEKHKVYACEVTHQGLSSPVTKSFNRGEC |
| 563 | ATX-P-594 | LC Kappa | EIVLTQSPGTLSLSPGERATLSCRASQSVSSSYLAWYQQKPGQSPRLLI |
| | | | YGASSRATGIPDRFSGSGSGTDFTLTISRLEPEDFAVYYCQQYGRSVTF |
| | | | GGGTKLEIKRTVAAPSVFIFPPSDEQLKSGTASVVCLLNNFYPREAKV |
| | | | QWKVDNALQSGNSQESVTEQDSKDSTYSLSSTLTLSKADYEKHKVY |
| | | | ACEVTHQGLSSPVTKSFNRGEC |
| 564 | ATX-P-595 | LC Kappa | DIVMTQSPDSLAVSLGERATINCKSSQSVLYSSNNKNYLAWYQQKPG |
| | | | QPPKLLIYWASTRESGVPDRFSGSGSGTDFTLTISSLQAEDVAVYYCQ |
| | | | QYYSTPYTFGQGTKLEIKRTVAAPSVFIFPPSDEQLKSGTASVVCLLNN |
| | | | FYPREAKVQWKVDNALQSGNSQESVTEQDSKDSTYSLSSTLILSKAD |
| | | | YEKHKVYACEVTHQGLSSPVTKSFNRGEC |
| 565 | ATX-P-604 | LC Kappa | EIVLTQSPDTLSLSPGERATLSCRASQTIRSSYLAWYQLKPGQAPRLLI |
| | | | YGASSRATGIPDRFSGSGSGTDFTLSISRLEPEDFAVYYCQQYGRSIIFG |
| | | | GGTKVEIKRTVAAPSVFIFPPSDEQLKSGTASVVCLLNNFYPREAKVQ |
| | | | WKVDNALQSGNSQESVTEQDSKDSTYSLSSTLTLSKADYEKHKVYA |
| | | | CEVTHQGLSSPVIKSFNRGEC |
| 566 | ATX-P-610 | LC Kappa | DIQMTQSPSSVSASVGDRVTITCRASQGISSWLAWYQQKPGKAPKLLI |
| | | | YAASSLQSGVPSRFSGSGSGTDFTLTISSLQPEDFATYYCQQNYRTPIT |
| | | | FGQGTRLEIKRTVAAPSVFIFPPSDEQLKSGTASVVCLLNNFYPREAKV |
| | | | QWKVDNALQSGNSQESVTEQDSKDSTYSLSSTLTLSKADYEKHKVY |
| | | | ACEVTHQGLSSPVTKSFNRGEC |
| 567 | ATX-P-560 | LC Kappa- | GACATCCAGATGACCCAGTCTCCATCTTCCGTGTCTACATCTGTTG |
| | | nucleotide | GAGACAGAGTCACCATCACTTGTCGGGCGAGTCAGGGTATTAGCA |
| | | | GCTGGTTAGCCTGGTATCAGCAGAAACCAGGGAAAGCCCCTAAGC |
| | | | TCCTGATCTCTGCTGCATCCAGTTTGCAAAGTGGGGTCCCATCAAG |
| | | | GTTCAGCGGCAGTGGATCTGGGACAGATTTCACTCTCACCATCAGC |
| | | | ACCCTGCAGCCTGAAGACTTTGCATCTTACTATTGTCAACAGGCTA |
| | | | ACAGTTTCCCTCCGACGTTCGGCCAAGGGACCAGGGTGGAAATCA |
| | | | AACGTACGGTAGCTGCCCCTTCAGTTTTTATCTTTCCGCCGTCTGA |
| | | | CGAGCAGTTAAAATCCGGGACCGCTTCTGTAGTTTGCCTGCTGAAT |
| | | | AATTTTTATCCGCGTGAGGCTAAAGTACAATGGAAAGTCGACAAT |
| | | | GCTTTGCAGTCGGGAAATTCACAGGAAAGTGTTACGGAGCAGGAT |
| | | | TCTAAAGATTCCACATATTCACTCAGCTCCACCCTTACACTGAGCA |
| | | | AAGCCGACTATGAAAAACATAAAGTTTACGCATGTGAGGTGACGC |
| | | | ACCAAGGATTATCCAGTCCGGTCACAAAATCGTTTAACCGCGGTG |
| | | | AGTGT |
| 568 | ATX-P-561 | LC Kappa- | GACATCCAGATGACCCAGTCTCCATCTTCCCTGTCTGCATCTGTCG |
| | | nucleotide | GAGACAGAGTCACCATCACTTGTCGGGCGAGTCAGGGTATTAGCA |
| | | | GCTGGTTAACCTGGTATCAGCAGAAACCAGGGAAAGCCCCTAAGC |
| | | | TCCTGATCTATGCTGCATCCAGTTTGCAAGGTGGGGTCCCATCAAG |
| | | | ATTCAGCGGCAGTGGATCTGGGACAGATTTCACTCTCACCATCAGC |
| | | | AGCCTGCAGCCTGAAGATTTTGCAACTTACTATTGTCAACAGGCTA |
| | | | ACAGTTTCCCTCCGACGTTCGGCCAAGGGACCAAGGTGGAAATCA |
| | | | AACGTACGGTAGCTGCCCCTTCAGTTTTTATCTTTCCGCCGTCTGA |
| | | | CGAGCAGTTAAAATCCGGGACCGCTTCTGTAGTTTGCCTGCTGAAT |
| | | | AATTTTTATCCGCGTGAGGCTAAAGTACAATGGAAAGTCGACAAT |
| | | | GCTTTGCAGTCGGGAAATTCACAGGAAAGTGTTACGGAGCAGGAT |
| | | | TCTAAAGATTCCACATATTCACTCAGCTCCACCCTTACACTGAGCA |
| | | | AAGCCGACTATGAAAAACATAAAGTTTACGCATGTGAGGTGACGC |
| | | | ACCAAGGATTATCCAGTCCGGTCACAAAATCGTTTAACCGCGGTG |
| | | | AGTGT |
| 569 | ATX-P-562 | LC Kappa- | GACATCCAGATGACCCAGTCTCCATCTTCCGTGTCTGCATCTATAG |
| | | nucleotide | GAGACAGAGTCACCATCACTTGTCGGGCGAGTAAGGGAATTAGCA |
| | | | TCTGGTTAGCCTGGTATCAGCAGAAACCAGGGAAAGCCCCTAAGG |
| | | | TCCTGATCTCTGCTGCATCCAGTTTGCAAAGTGGGGCCCCATCAAG |
| | | | GTTCAGCGGCAGTGGATCTGGGACAGATTTCACTCTCACCATCAGC |
| | | | AGCCTGCAGCCTGAAGATTTTGCAACTTACTATTGTCAACAGGCTA |
| | | | ACAGTTTCCCTCCGACGTTCGGCCAAGGGACCAAGGTGGAGATCA |
| | | | AACGTACGGTAGCTGCCCCTTCAGTTTTTATCTTTCCGCCGTCTGA |
| | | | CGAGCAGTTAAAATCCGGGACCGCTTCTGTAGTTTGCCTGCTGAAT |
| | | | AATTTTTATCCGCGTGAGGCTAAAGTACAATGGAAAGTCGACAAT |
| | | | GCTTTGCAGTCGGGAAATTCACAGGAAAGTGTTACGGAGCAGGAT |
| | | | TCTAAAGATTCCACATATTCACTCAGCTCCACCCTTACACTGAGCA |
| | | | AAGCCGACTATGAAAAACATAAAGTTTACGCATGTGAGGTGACGC |
| | | | ACCAAGGATTATCCAGTCCGGTCACAAAATCGTTTAACCGCGGTG |
| | | | AGTGT |
| 570 | ATX-P-566 | LC Kappa- | GAAATTGTGTTGACGCAGTCTCCAGGCACCCTGTCTTTGTCTCCAG |
| | | nucleotide | GGGACAGAGCCACCCTCTCATGCAGGGCCAGTCAGAGTGTTAGGA |
| | | | ACAGTTACGTAGCCTGGTACCAGCAGAAACCTGGCCAGGCTCCCA |
| | | | GGCTCCTCATCTATGGTGCATCCAGCAGGGCCACTGGCATCCCAG |
| | | | ACAGGTTCAGTGGCAGTGGGTCTGGGACAGACTTCAGTCTCACCA |
| | | | TCGGCAGACTGGAGCCTGAGGATTTTGTAGTGTATTATTGTCAGCA |
| | | | ATACGGTAACTCACCTCTCACTTTCGGCGGAGGGACCAAGGTGGA |
| | | | GATCAAACGTACGGTAGCTGCCCCTTCAGTTTTTATCTTTCCGCCG |
| | | | TCTGACGAGCAGTTAAAATCCGGGACCGCTTCTGTAGTTTGCCTGC |
| | | | TGAATAATTTTTATCCGCGTGAGGCTAAAGTACAATGGAAAGTCG |
| | | | ACAATGCTTTGCAGTCGGGAAATTCACAGGAAAGTGTTACGGAGC |
| | | | AGGATTCTAAAGATTCCACATATTCACTCAGCTCCACCCTTACACT |
| | | | GAGCAAAGCCGACTATGAAAAACATAAAGTTTACGCATGTGAGGT |
| | | | GACGCACCAAGGATTATCCAGTCCGGTCACAAAATCGTTTAACCG |
| | | | CGGTGAGTGT |
| 571 | ATX-P-572 | LC Kappa- | GACATCGTGATGACCCAGTCTCCAGACTCCCTGGCTGTGTCTCTGG |
| | | nucleotide | GCGAGAGGGCCACCATCAACTGCAAGTCCAGCCAGAGTGTTTTAT |
| | | | ACAGCTCCAACAATAAGAACTACTTAGCTTGGTACCAGCAGAAAC |
| | | | CTGGACAGCCTCCTAAGCTGCTCATTTACTGGGCATCTCCCCGGGA |
| | | | ATCCGGGGTCCCTGACCGGTTCAGTGGCAGCGGGTCTGGGACAGA |
| | | | TTTCACTCTCACCATCAGCAGCCTGCAGGCTGAAGATGTGGCAGTT |
| | | | TATTATTGTCAGCAATATTATAGTATTCCTCGGACGTTCGGCCAAG |
| | | | GGACCAAGGTGGAAATCAAACGTACGGTAGCTGCCCCTTCAGTTT |
| | | | TTATCTTTCCGCCGTCTGACGAGCAGTTAAAATCCGGGACCGCTTC |
| | | | TGTAGTTTGCCTGCTGAATAATTTTTATCCGCGTGAGGCTAAAGTA |
| | | | CAATGGAAAGTCGACAATGCTTTGCAGTCGGGAAATTCACAGGAA |
| | | | AGTGTTACGGAGCAGGATTCTAAAGATTCCACATATTCACTCAGCT |
| | | | CCACCCTTACACTGAGCAAAGCCGACTATGAAAAACATAAAGTTT |
| | | | ACGCATGTGAGGTGACGCACCAAGGATTATCCAGTCCGGTCACAA |
| | | | AATCGTTTAACCGCGGTGAGTGT |
| 572 | ATX-P-573 | LC Kappa- | GACATCCAGATGACCCAGTCTCCATCTTCCGTGTCTGCATCTGTAG |
| | | nucleotide | GAGACAGAGTCACCATCACTTGTCGGGCGAGTCAGGGTATTAGCA |
| | | | GCTGGTTAGCCTGGTATCAGCAGAAACCAGGGAAAGCCCCTAAGG |
| | | | TCCTGATCTATGCTGCATCCAGTTTGCAAAGTGGGGTCCCATCAAG |
| | | | GTTCAGCGGCAGTGGATCTGGGACAGATTTCACTCTCACCATCAGC |
| | | | AGCCTGCAGCCTGAAGATTTTGCAACTTACTATTGTCAACAGGCTA |
| | | | ACAGTTTCCCTCCCACTTTCGGCCCTGGGACCAAAGTGGATATCAA |
| | | | ACGTACGGTAGCTGCCCCTTCAGTTTTTATCTTTCCGCCGTCTGAC |
| | | | GAGCAGTTAAAATCCGGGACCGCTTCTGTAGTTTGCCTGCTGAATA |
| | | | ATTTTTATCCGCGTGAGGCTAAAGTACAATGGAAAGTCGACAATG |
| | | | CTTTGCAGTCGGGAAATTCACAGGAAAGTGTTACGGAGCAGGATT |
| | | | CTAAAGATTCCACATATTCACTCAGCTCCACCCTTACACTGAGCAA |
| | | | AGCCGACTATGAAAAACATAAAGTTTACGCATGTGAGGTGACGCA |
| | | | CCAAGGATTATCCAGTCCGGTCACAAAATCGTTTAACCGCGGTGA |
| | | | GTGT |
| 573 | ATX-P-581 | LC Kappa- | GACATCCAGATGACTCAGTCTCCATCTTCCGTGTCTGCATCTGTAG |
| | | nucleotide | GAGACAGAGTCACCATCACTTGTCGGGCGAGTCAGGGTGTTAACA |
| | | | ACTGGTTAGCCTGGTATCAGCAGAAACCAGGGAAAGCCCCTAAGC |
| | | | TCCTGATCCATGCTGCATCCAGTTTGCTAAGTGGGGTCCCATCAAG |
| | | | GTTCAGCGGCAGTGGATCTGGGACAGATTTCACGCTCACCATCAC |
| | | | CAGCCTGCAGCCTGAAGATTTTGCAACTTACTATTGTCAACAGGCT |
| | | | AACAGTTTCCCCATCACCTTCGGCCAAGGGACACGACTGGAAATT |
| | | | AAACGTACGGTAGCTGCCCCTTCAGTTTTTATCTTTCCGCCGTCTG |
| | | | ACGAGCAGTTAAAATCCGGGACCGCTTCTGTAGTTTGCCTGCTGAA |
| | | | TAATTTTTATCCGCGTGAGGCTAAAGTACAATGGAAAGTCGACAA |
| | | | TGCTTTGCAGTCGGGAAATTCACAGGAAAGTGTTACGGAGCAGGA |
| | | | TTCTAAAGATTCCACATATTCACTCAGCTCCACCCTTACACTGAGC |
| | | | AAAGCCGACTATGAAAAACATAAAGTTTACGCATGTGAGGTGACG |
| | | | CACCAAGGATTATCCAGTCCGGTCACAAAATCGTTTAACCGCGGT |
| | | | GAGTGT |
| 574 | ATX-P-587 | LC Kappa- | GACATCGTGATGACCCAGTCTCCAGACTCCCTGGCTGTGTCTCTGG |
| | | nucleotide | GCGAGAGGGCCACCATCAACTGCAAGTCCAGCCAGAGTGTTTTAT |
| | | | ACAGCTCCAACAATAAGAACTACTTAGCTTGGTACCAGCAGAAAC |
| | | | CAGGACAGCCTCCTAAGCTGCTCATTTACTGGGCATCTACCCGGGA |
| | | | ATCCGGGGTCCCTGACCGATTCAGTGGCAGCGGGTCTGGGACAGA |
| | | | TTTCACTCTCACCATCAGCAGCCTGCAGGCTGAAGATGTGGCAGTT |
| | | | TATTACTGTCAGCAATATTATAGTACTCCGTACACTTTTGGCCAGG |
| | | | GGACCAAGCTGGAGATCAAACGTACGGTAGCTGCCCCTTCAGTTT |
| | | | TTATCTTTCCGCCGTCTGACGAGCAGTTAAAATCCGGGACCGCTTC |
| | | | TGTAGTTTGCCTGCTGAATAATTTTTATCCGCGTGAGGCTAAAGTA |
| | | | CAATGGAAAGTCGACAATGCTTTGCAGTCGGGAAATTCACAGGAA |
| | | | AGTGTTACGGAGCAGGATTCTAAAGATTCCACATATTCACTCAGCT |
| | | | CCACCCTTACACTGAGCAAAGCCGACTATGAAAAACATAAAGTTT |
| | | | ACGCATGTGAGGTGACGCACCAAGGATTATCCAGTCCGGTCACAA |
| | | | AATCGTTTAACCGCGGTGAGTGT |
| 575 | ATX-P-592 | LC Kappa- | GACATCGTGATGACCCAGTCTCCAGACTCCCTGGCTGTGTCTCTGG |
| | | nucleotide | GCGAGAGGGCCACCATCAACTGCAAGTCCAGCCAGAGTGTTTTAT |
| | | | ACAGCTCCAACAATAAGAACTACTTAGCTTGGTACCAGCAGAAAC |
| | | | CAGGACAGCCTCCTAAGCTGCTCATTTACTGGGCATCTAACCGGG |
| | | | AATCCGGGGTCCCTGACCGATTCAGTGGCTCCGGGTCTGGGACAG |
| | | | ATTTCACTCTCACCATCAGCAGCCTGCAGGCTGAAGATGTGGCAGT |
| | | | TTATTACTGTCAGCAATATTATAGTACTCCGTACACTTTTGGCCAG |
| | | | GGGACCAAGCTGGAGATCAAACGTACGGTAGCTGCCCCTTCAGTT |
| | | | TTTATCTTTCCGCCGTCTGACGAGCAGTTAAAATCCGGGACCGCTT |
| | | | CTGTAGTTTGCCTGCTGAATAATTTTTATCCGCGTGAGGCTAAAGT |
| | | | ACAATGGAAAGTCGACAATGCTTTGCAGTCGGGAAATTCACAGGA |
| | | | AAGTGTTACGGAGCAGGATTCTAAAGATTCCACATATTCACTCAG |
| | | | CTCCACCCTTACACTGAGCAAAGCCGACTATGAAAAACATAAAGT |
| | | | TTACGCATGTGAGGTGACGCACCAAGGATTATCCAGTCCGGTCAC |
| | | | AAAATCGTTTAACCGCGGTGAGTGT |
| 576 | ATX-P-594 | LC Kappa- | GAAATTGTGTTGACGCAGTCTCCAGGCACCCTGTCTTTGTCTCCAG |
| | | nucleotide | GGGAGAGAGCCACCCTCTCCTGCAGGGCCAGTCAGAGTGTTAGCA |
| | | | GCAGCTACTTAGCCTGGTACCAGCAGAAACCTGGCCAGTCTCCCA |
| | | | GGCTCCTCATCTATGGTGCATCCAGCAGGGCCACTGGCATCCCAG |
| | | | ACAGGTTCAGTGGCAGTGGGTCTGGGACAGACTTCACTCTCACCA |
| | | | TCAGCAGACTGGAGCCTGAGGATTTTGCAGTATATTACTGTCAGCA |
| | | | GTATGGTAGGTCAGTCACTTTCGGCGGAGGGACCAAGCTGGAAAT |
| | | | CAAACGTACGGTAGCTGCCCCTTCAGTTTTTATCTTTCCGCCGTCT |
| | | | GACGAGCAGTTAAAATCCGGGACCGCTTCTGTAGTTTGCCTGCTGA |
| | | | ATAATTTTTATCCGCGTGAGGCTAAAGTACAATGGAAAGTCGACA |
| | | | ATGCTTTGCAGTCGGGAAATTCACAGGAAAGTGTTACGGAGCAGG |
| | | | ATTCTAAAGATTCCACATATTCACTCAGCTCCACCCTTACACTGAG |
| | | | CAAAGCCGACTATGAAAAACATAAAGTTTACGCATGTGAGGTGAC |
| | | | GCACCAAGGATTATCCAGTCCGGTCACAAAATCGTTTAACCGCGG |
| | | | TGAGTGT |
| 577 | ATX-P-595 | LC Kappa- | GACATCGTGATGACCCAGTCTCCAGACTCCCTGGCTGTGTCTCTGG |
| | | nucleotide | GCGAGAGGGCCACCATCAACTGCAAGTCCAGCCAGAGTGTTTTAT |
| | | | ACAGCTCCAACAATAAGAACTACTTAGCTTGGTACCAGCAGAAAC |
| | | | CAGGACAGCCTCCTAAGCTGCTCATTTACTGGGCATCTACCCGGGA |
| | | | ATCCGGGGTCCCTGACCGATTCAGTGGCAGCGGGTCTGGGACAGA |
| | | | TTTCACTCTCACCATCAGCAGCCTGCAGGCTGAAGATGTGGCAGTT |
| | | | TATTACTGTCAGCAATATTATAGTACTCCGTACACTTTTGGCCAGG |
| | | | GGACCAAGCTGGAAATCAAACGTACGGTAGCTGCCCCTTCAGTTT |
| | | | TTATCTTTCCGCCGTCTGACGAGCAGTTAAAATCCGGGACCGCTTC |
| | | | TGTAGTTTGCCTGCTGAATAATTTTTATCCGCGTGAGGCTAAAGTA |
| | | | CAATGGAAAGTCGACAATGCTTTGCAGTCGGGAAATTCACAGGAA |
| | | | AGTGTTACGGAGCAGGATTCTAAAGATTCCACATATTCACTCAGCT |
| | | | CCACCCTTACACTGAGCAAAGCCGACTATGAAAAACATAAAGTTT |
| | | | ACGCATGTGAGGTGACGCACCAAGGATTATCCAGTCCGGTCACAA |
| | | | AATCGTTTAACCGCGGTGAGTGT |
| 578 | ATX-P-604 | LC Kappa- | GAAATAGTGCTGACTCAGTCTCCAGACACCCTATCTTTGTCTCCAG |
| | | nucleotide | GGGAAAGAGCCACCCTCTCCTGCAGGGCCAGTCAGACTATTAGGA |
| | | | GCAGCTACTTAGCCTGGTACCAGCTGAAACCTGGCCAGGCTCCCA |
| | | | GGCTCCTCATCTATGGTGCATCCAGCAGGGCCACTGGCATCCCAG |
| | | | ACAGGTTCAGTGGCAGTGGGTCTGGGACAGACTTCACTCTCTCCAT |
| | | | CAGCAGACTGGAGCCTGAAGATTTTGCAGTGTATTACTGTCAACA |
| | | | GTATGGCCGCTCAATCATTTTCGGCGGAGGGACCAAAGTGGAAAT |
| | | | CAAACGTACGGTAGCTGCCCCTTCAGTTTTTATCTTTCCGCCGTCT |
| | | | GACGAGCAGTTAAAATCCGGGACCGCTTCTGTAGTTTGCCTGCTGA |
| | | | ATAATTTTTATCCGCGTGAGGCTAAAGTACAATGGAAAGTCGACA |
| | | | ATGCTTTGCAGTCGGGAAATTCACAGGAAAGTGTTACGGAGCAGG |
| | | | ATTCTAAAGATTCCACATATTCACTCAGCTCCACCCTTACACTGAG |
| | | | CAAAGCCGACTATGAAAAACATAAAGTTTACGCATGTGAGGTGAC |
| | | | GCACCAAGGATTATCCAGTCCGGTCACAAAATCGTTTAACCGCGG |
| | | | TGAGTGT |
| 579 | ATX-P-610 | LC Kappa- | GACATCCAGATGACCCAGTCTCCATCTTCCGTGTCTGCATCTGTAG |
| | | nucleotide | GAGACAGAGTCACCATCACTTGTCGGGCGAGTCAGGGTATTAGCA |
| | | | GCTGGTTAGCCTGGTATCAGCAGAAACCAGGGAAAGCCCCTAAGC |
| | | | TCCTGATCTATGCTGCATCCAGTTTGCAAAGTGGGGTCCCATCAAG |
| | | | GTTCAGCGGCAGTGGATCTGGGACAGATTTCACTCTCACCATCAGC |
| | | | AGCCTGCAGCCTGAAGATTTTGCAACTTACTACTGTCAACAGAATT |
| | | | ACAGAACCCCGATCACCTTCGGCCAAGGGACACGACTGGAGATTA |
| | | | AACGTACGGTAGCTGCCCCTTCAGTTTTTATCTTTCCGCCGTCTGA |
| | | | CGAGCAGTTAAAATCCGGGACCGCTTCTGTAGTTTGCCTGCTGAAT |
| | | | AATTTTTATCCGCGTGAGGCTAAAGTACAATGGAAAGTCGACAAT |
| | | | GCTTTGCAGTCGGGAAATTCACAGGAAAGTGTTACGGAGCAGGAT |
| | | | TCTAAAGATTCCACATATTCACTCAGCTCCACCCTTACACTGAGCA |
| | | | AAGCCGACTATGAAAAACATAAAGTTTACGCATGTGAGGTGACGC |
| | | | ACCAAGGATTATCCAGTCCGGTCACAAAATCGTTTAACCGCGGTG |
| | | | AGTGT |

[0205] Human complement factor H-related protein 4b (CFHR4b) (see, e.g., UniProt Accession No. Q92496):

(SEQ ID NO: 580)
MLLLINVILTLWVSCANGQEVKPCDFPEIQHGGLYYKSLRRLYFPAAAG
QSYSYYCDQNFVTPSGSYWDYIHCTQDGWSPTVPCLRTCSKSDIEIENG
FISESSSIYILNKEIQYKCKPGYATADGNSSGSITCLQNGWSAQPICIK
FCDMPVFENSRAKSNGMRFKLHDTLDYECYDGYEISYGNTTGSIVCGED
GWSHFPTCYNSSEKCGPPPPISNGDTTSFLLKVYVPQSRVEYQCQSYYE
LQGSNYVTCSNGEWSEPPRCIHPCIITEENMNKNNIQLKGKSDIKYYAK
TGDTIEFMCKLGYNANTSVLSFQAVCREGIVEYPRCE.

[0206] Human CFHL1-Y402H-His (ATX-P-421):

(SEQ ID NO: 581)
MYRMQLLSCIALSLALVTNSEDCNELPPRRNTEILTGSWSDQTYPEGTQ
AIYKCRPGYRSLGNVIMVCRKGEWVALNPLRKCQKRPCGHPGDTPFGTF
TLTGGNVFEYGVKAVYTCNEGYQLLGEINYRECDTDGWTNDIPICEVVK
CLPVTAPENGKIVSSAMEPDREYHFGQAVRFVCNSGYKIEGDEEMHCSD
DGFWSKEKPKCVEISCKSPDVINGSPISQKIIYKENERFQYKCNMGYEY
SERGDAVCTESGWRPLPSCEEKSCDNPYIPNGDYSPLRIKHRTGDEITY
QCRNGFYPATRGNTAKCTSTGWIPAPRCTLKPCDYPDIKHGGLYHENMR
RPYFPVAVGKYYSYYCDEHFETPSGSYWDHIHCTQDGWSPAVPCLRKCY
FPYLENGYNQNHGRKFVQGKSIDVACHPGYALPKAQTTVTCMENGWSPT
PRCIRVSFTLGGGGSGLNDIFEAQKIEWHEGGGGSHHHHHH.

TABLE 6
Anti-C3 antibodies (CDR sequences)

| | | | |
|---|---|---|---|
| SEQ ID | Antibody | | |
| NO: | Name: | Descriptor: | Sequence: |

VH Family: IGHV-1, 3, 5, 7

| | | | |
|---|---|---|---|
| 582 | — | HCDR1 | X₁YX₂X₃X₄ |
| | | Consensus | (X₁ is G, S, N, D, T, or A; X₂ is Y, A, G, W, or T; X₃ is L, M, I, or |
| | | | V; X₄ is H, N, S, or G) |
| 583 | ATX-P-3369 | HCDR1 | GYYLH |
| 584 | ATX-P-3396 | HCDR1 | GYYMH |
| 585 | ATX-P-3413 | HCDR1 | GYYMH |
| 586 | ATX-P-3418 | HCDR1 | SYAMN |
| 587 | ATX-P-3419 | HCDR1 | SYGIS |
| 588 | ATX-P-3426 | HCDR1 | SYWIG |
| 589 | ATX-P-3428 | HCDR1 | GYGIS |
| 590 | ATX-P-3431 | HCDR1 | NYWIG |
| 591 | ATX-P-3432 | HCDR1 | DYYMH |
| 592 | ATX-P-3433 | HCDR1 | DYYMH |
| 593 | ATX-P-3435 | HCDR1 | NYGIS |
| 594 | ATX-P-3440 | HCDR1 | TYGIS |
| 595 | ATX-P-3452 | HCDR1 | GYYMN |
| 596 | ATX-P-3454 | HCDR1 | NYAVN |
| 597 | ATX-P-3458 | HCDR1 | GYYLH |
| 598 | ATX-P-3466 | HCDR1 | SYTMN |
| 599 | ATX-P-3469 | HCDR1 | AYAIH |
| 600 | ATX-P-3470 | HCDR1 | SYTMN |
| 601 | — | HCDR2 | (X₁ is W, I, or V; X₂ is N, S, or Y; X₃ is P, T, A, G, or Y; X₄ is N, |
| | | Consensus | Y, G, D, H, or A; X₅ is S, T, N, G, or D; X₆ is G, or S; X₇ is D, G, |
| | | | T, N, V, A, or H; X₈ is T, P, or K; X₉ is N, Y, T, H, R, I, D, or K; |
| | | | X₁₀ is Y, or A; X₁₁ is V, Q, A, or S; X₁₂ is Q, K, P, or D; X₁₃ is N, |
| | | | F, K, G, S, or Q; X₁₄ is F, Q, L, or V; X₁₅ is Q, G, T, or K) |
| 602 | ATX-P-3369 | HCDR2 | WINPNSGDTNYVQNFQG |
| 603 | ATX-P-3396 | HCDR2 | WINPNSGGTYAQKFOG |
| 604 | ATX-P-3413 | HCDR2 | WINPNSGGTTYAQKFQG |
| 605 | ATX-P-3418 | HCDR2 | WINTNTGTPTYAQGFTG |
| 606 | ATX-P-3419 | HCDR2 | WISAYNGNTHYAONLQG |
| 607 | ATX-P-3426 | HCDR2 | IIYPGDSDTRYSPSFQG |
| 608 | ATX-P-3428 | HCDR2 | WISAYNGNTHYAONLQG |
| 609 | ATX-P-3431 | HCDR2 | IIYPGDSDTIYSPSFQG |
| 610 | ATX-P-3432 | HCDR2 | WINPNSGVTYYAQKFQG |
| 611 | ATX-P-3433 | HCDR2 | WINPNNGGTDYAQKFQG |
| 612 | ATX-P-3435 | HCDR2 | WISAYNGNTHYAQKLOG |
| 613 | ATX-P-3440 | HCDR2 | WISAYSGNTNYAQKLOG |
| 614 | ATX-P-3452 | HCDR2 | WINPNSGATNYAQKFOG |
| 615 | ATX-P-3454 | HCDR2 | WINTNTGHPTYAQGFTG |
| 616 | ATX-P-3458 | HCDR2 | WINPHSGGTIYAQKFQD |
| 617 | ATX-P-3466 | HCDR2 | WINTATGTPTYAQGFTG |
| 618 | ATX-P-3469 | HCDR2 | VISYDGSNKKYADSVKG |
| 619 | ATX-P-3470 | HCDR2 | WINTNTGTPTYAQGFTG |
| 620 | ATX-P-3369 | HCDR3 | SYVDTSSSAFDI |
| 621 | ATX-P-3396 | HCDR3 | ERGDYDGDAFDI |
| 622 | ATX-P-3413 | HCDR3 | EAGGSGEYFQH |
| 623 | ATX-P-3418 | HCDR3 | HSTSEDY |
| 624 | ATX-P-3419 | HCDR3 | SIAALDF |
| 625 | ATX-P-3426 | HCDR3 | HDYFDIGGYFDY |
| 626 | ATX-P-3428 | HCDR3 | AGLGIDY |
| 627 | ATX-P-3431 | HCDR3 | GRGYSGYEGAFDI |
| 628 | ATX-P-3432 | HCDR3 | DRTFYFDY |
| 629 | ATX-P-3433 | HCDR3 | GVYDVVVPTAIVNWFDP |
| 630 | ATX-P-3435 | HCDR3 | AAAAVDY |
| 631 | ATX-P-3440 | HCDR3 | ERVSNWVFDF |
| 632 | ATX-P-3452 | HCDR3 | DGAKWNHEGYYFDY |
| 633 | ATX-P-3454 | HCDR3 | DSSSWGY |
| 634 | ATX-P-3458 | HCDR3 | WNSGDSYYYYMDV |
| 635 | ATX-P-3466 | HCDR3 | YSGSHSFDY |
| 636 | ATX-P-3469 | HCDR3 | GLPFDY |
| 637 | ATX-P-3470 | HCDR3 | YTGNYSEDY |

VH Family: IGHV3

| | | | |
|---|---|---|---|
| 638 | — | HCDR1 | X₁X₂X₃MX₄ |
| | | Consensus | (X₁ is D, N, S, or A; X₂ is Y, or A; X₃ is A, W, Y, S, C, D, or G; |
| | | | X₄ is H. S, or N) |
| 639 | ATX-P-3362 | HCDR1 | DYAMH |
| 640 | ATX-P-3366 | HCDR1 | NAWMS |
| 641 | ATX-P-3395 | HCDR1 | SYWMH |
| 642 | ATX-P-3397 | HCDR1 | NYYMN |
| 643 | ATX-P-3405 | HCDR1 | SYSMN |
| 644 | ATX-P-3407 | HCDR1 | SYCMN |
| 645 | ATX-P-3408 | HCDR1 | SYWMH |
| 646 | ATX-P-3410 | HCDR1 | AYDMH |
| 647 | ATX-P-3444 | HCDR1 | SYGMN |
| 648 | ATX-P-3463 | HCDR1 | SYAMH |
| 649 | ATX-P-3468 | HCDR1 | SYAMH |
| 650 | ATX-P-3471 | HCDR1 | SYAMS |
| 651 | — | HCDR2 | X₁IX₂X₃X₄X₅X₆X₇X₈X₉X₁₀X₁₁X₁₂X₁₃X₁₄X₁₅ |
| | | Consensus | (X₁ is G, R, N, S, H, T, V, or A; X₂ is S, K, N, or G; X₃ is W, S, |
| | | | Q, T, G, or Y; X₄ is N, K, D, S, A, or Y; X₅ is S, T, or G; X₆ is G, |
| | | | D, or S; X₇ is S, G, E, Y, T, or N; X₈ is I, G, T, K, or Y; X₉ is A, |
| | | | T, S, Y, or N; X₁₀ is Y, T, P, or F; X₁₁ is A, D, or V; X₁₂ is D, Y, |
| | | | S, or A; X₁₃ is S, A, or V; X₁₄ is V, A, or K; X₁₅ is K, P, Q, or G) |
| 652 | ATX-P-3362 | HCDR2 | GISWNSGSIAYADSVKG |
| 653 | ATX-P-3366 | HCDR2 | RIKSKTDGGTTDYAAPVKG |
| 654 | ATX-P-3395 | HCDR2 | RINSDGSSTSYADSVQG |
| 655 | ATX-P-3397 | HCDR2 | NIKQDGSEKYYVDSVKG |
| 656 | ATX-P-3405 | HCDR2 | SISSSSSYIYYADSVKG |
| 657 | ATX-P-3407 | HCDR2 | SINSDSSYIYYADSVKG |
| 658 | ATX-P-3408 | HCDR2 | HINSDGSSTNYADSVKG |
| 659 | ATX-P-3410 | HCDR2 | TIGTAGDTYYPDSVKG |
| 660 | ATX-P-3444 | HCDR2 | SISGYGSYIYYAASVKG |
| 661 | ATX-P-3463 | HCDR2 | VISYDGSNKYYADSVKG |
| 662 | ATX-P-3468 | HCDR2 | VISYDGSNKYYADSVKG |
| 663 | ATX-P-3471 | HCDR2 | AISGSGDSTYFADSVKG |
| 664 | ATX-P-3362 | HCDR3 | VAAAAGIPFFDY |
| 665 | ATX-P-3366 | HCDR3 | RYNSDFDY |
| 666 | ATX-P-3395 | HCDR3 | GOHLVODY |
| 667 | ATX-P-3397 | HCDR3 | DGYYNFDAFDI |
| 668 | ATX-P-3405 | HCDR3 | EGYDNWNSACDI |
| 669 | ATX-P-3407 | HCDR3 | EGYYNWNGGNDY |
| 670 | ATX-P-3408 | HCDR3 | EGYWNGDTFDI |
| 671 | ATX-P-3410 | HCDR3 | GGSSSWYDWYFDL |
| 672 | ATX-P-3444 | HCDR3 | ELGGIYYGVGYFDL |
| 673 | ATX-P-3463 | HCDR3 | RGGYSYGPFEH |
| 674 | ATX-P-3468 | HCDR3 | RGNWNYGPFHY |
| 675 | ATX-P-3471 | HCDR3 | ILGYCSGTSCYGLFDN |

VH Family: IGHV4-4

| | | | |
|---|---|---|---|
| 676 | — | HCDR1 | X₁X₂X₃WWX₄ |
| | | Consensus | (X₁ is I, S, R, N, or K; X₂ is N, D, S, or G; X₃ is N, S, T, D, Y, or |
| | | | H; X₄ is S, N, or T) |
| 677 | ATX-P-3360 | HCDR1 | INNWWS |
| 678 | ATX-P-3361 | HCDR1 | SNNWWS |
| 679 | ATX-P-3363 | HCDR1 | RDNWWS |
| 680 | ATX-P-3365 | HCDR1 | SNNWWS |
| 681 | ATX-P-3373 | HCDR1 | NDNWWS |
| 682 | ATX-P-3378 | HCDR1 | NDNWWS |
| 683 | ATX-P-3382 | HCDR1 | SNSWWN |
| 684 | ATX-P-3383 | HCDR1 | KDNWWT |
| 685 | ATX-P-3384 | HCDR1 | SDNWWN |
| 686 | ATX-P-3386 | HCDR1 | NDNWWS |
| 687 | ATX-P-3387 | HCDR1 | NDNWWN |
| 688 | ATX-P-3389 | HCDR1 | SSNWWS |
| 689 | ATX-P-3391 | HCDR1 | NDNWWS |
| 690 | ATX-P-3392 | HCDR1 | NDNWWS |
| 691 | ATX-P-3412 | HCDR1 | SSTWWS |
| 692 | ATX-P-3421 | HCDR1 | SNNWWS |
| 693 | ATX-P-3430 | HCDR1 | SSDWWS |
| 694 | ATX-P-3437 | HCDR1 | SNNWWS |
| 695 | ATX-P-3438 | HCDR1 | NDYWWN |
| 696 | ATX-P-3441 | HCDR1 | SGHWWS |
| 697 | ATX-P-3442 | HCDR1 | SSDWWS |
| 698 | ATX-P-3453 | HCDR1 | SNNWWS |
| 699 | ATX-P-3455 | HCDR1 | SDNWWS |
| 700 | ATX-P-3456 | HCDR1 | SNNWWS |
| 701 | ATX-P-3459 | HCDR1 | SDNWWN |
| 702 | ATX-P-3462 | HCDR1 | SNNWWS |
| 703 | ATX-P-3467 | HCDR1 | SDYWWS |
| 704 | ATX-P-3472 | HCDR1 | NDNWWS |
| 705 | — | HCDR2 | X₁IX₂X₃SX₄X₅X₆X₇X₈NPSLX₉S |
| | | Consensus | (X₁ is K, Q, R, E, or D; X₂ is Y or F; X₃ is H or Q; X₄ is G, E, or |
| | | | R; X₅ is N, I, S, H, F, or T; X₆ is T or I; X₇ is D, N, or M; X₈ is Y |
| | | | or H; X₉ is K or R) |
| 706 | ATX-P-3360 | HCDR2 | KIYHSGNTDYNPSLKS |
| 707 | ATX-P-3361 | HCDR2 | QIYHSGITNYNPSLKS |
| 708 | ATX-P-3363 | HCDR2 | QIYQSGSTNYNPSLKS |
| 709 | ATX-P-3365 | HCDR2 | QIYHSGHTNYNPSLKS |
| 710 | ATX-P-3373 | HCDR2 | KIYHSEFTNYNPSLKS |
| 711 | ATX-P-3378 | HCDR2 | KIYHSEFTNYNPSLKS |
| 712 | ATX-P-3382 | HCDR2 | QIFHSGHTNYNPSLKS |
| 713 | ATX-P-3383 | HCDR2 | KIYHSGSTNYNPSLKS |
| 714 | ATX-P-3384 | HCDR2 | KIYHSGNTDYNPSLKS |
| 715 | ATX-P-3386 | HCDR2 | KIYHSGFTNYNPSLKS |
| 716 | ATX-P-3387 | HCDR2 | KIYHSGFTDYNPSLKS |
| 717 | ATX-P-3389 | HCDR2 | RIYHSGHTNYNPSLKS |
| 718 | ATX-P-3391 | HCDR2 | KIYHSEFTNYNPSLKS |
| 719 | ATX-P-3392 | HCDR2 | KIYHSEFTNYNPSLKS |
| 720 | ATX-P-3412 | HCDR2 | EIYHSGSTNYNPSLKS |
| 721 | ATX-P-3421 | HCDR2 | QIYHSENTNYNPSLKS |
| 722 | ATX-P-3430 | HCDR2 | EIYHSGSTNYNPSLKS |
| 723 | ATX-P-3437 | HCDR2 | EIYHSGNINYNPSLKS |
| 724 | ATX-P-3438 | HCDR2 | EIYHSGHTNYNPSLKS |
| 725 | ATX-P-344] | HCDR2 | EIYHSGNTNYNPSLKS |
| 726 | ATX-P-3442 | HCDR2 | EIYHSRNTNYNPSLKS |
| 727 | ATX-P-3453 | HCDR2 | RIYHSGTTNYNPSLES |
| 728 | ATX-P-3455 | HCDR2 | EIYHSENTNYNPSLKS |
| 729 | ATX-P-3456 | HCDR2 | DIYHSGNTNYNPSLKS |
| 730 | ATX-P-3459 | HCDR2 | KIYHSGNTNYNPSLKS |
| 731 | ATX-P-3462 | HCDR2 | KIYQSGSTMYNPSLKS |
| 732 | ATX-P-3467 | HCDR2 | KIYHSGNTNHNPSLKS |
| 733 | ATX-P-3472 | HCDR2 | KIYHSEFTNYNPSLRS |
| 734 | ATX-P-3360 | HCDR3 | GSDYDFWSGYLDY |
| 735 | ATX-P-3361 | HCDR3 | AQWELRAGWFDP |
| 736 | ATX-P-3363 | HCDR3 | VYDWNYGGHEDY |
| 737 | ATX-P-3365 | HCDR3 | GATEILGYFDL |
| 738 | ATX-P-3373 | HCDR3 | EYHNFMDV |
| 739 | ATX-P-3378 | HCDR3 | EYENFMDV |
| 740 | ATX-P-3382 | HCDR3 | GGEYENSANWFDP |
| 741 | ATX-P-3383 | HCDR3 | GGDIAMEGDWFAP |
| 742 | ATX-P-3384 | HCDR3 | GGTETTGYMDV |
| 743 | ATX-P-3386 | HCDR3 | GGDNFMEGEGLGT |
| 744 | ATX-P-3387 | HCDR3 | GNHNYLWIGYLGT |
| 745 | ATX-P-3389 | HCDR3 | GRDLTGYFDY |
| 746 | ATX-P-3391 | HCDR3 | GVDFWSGSHMDV |
| 747 | ATX-P-3392 | HCDR3 | EGLELPHMDV |
| 748 | ATX-P-3412 | HCDR3 | SLYNWNDAAFDI |
| 749 | ATX-P-3421 | HCDR3 | VDDWNYGGHFDY |
| 750 | ATX-P-3430 | HCDR3 | GGHIGYYYMDV |
| 751 | ATX-P-3437 | HCDR3 | GGEYGDPVGYFDL |
| 752 | ATX-P-3438 | HCDR3 | GGTEITGYMDV |
| 753 | ATX-P-3441 | HCDR3 | GHYGDYVVYFDY |
| 754 | ATX-P-3442 | HCDR3 | GGVVADYYMDV |
| 755 | ATX-P-3453 | HCDR3 | GEEWELRGGVEDI |
| 756 | ATX-P-3455 | HCDR3 | GRELTGLFDY |
| 757 | ATX-P-3456 | HCDR3 | GGIAVTAYFDY |
| 758 | ATX-P-3459 | HCDR3 | GVDFWSGSHMDV |
| 759 | ATX-P-3462 | HCDR3 | DKPPLLGAFDY |
| 760 | ATX-P-3467 | HCDR3 | EGLELPHMDV |
| 761 | ATX-P-3472 | HCDR3 | EYQNYMDV |

VH Family: IGHV4-5

| | | | |
|---|---|---|---|
| 762 | — | HCDR1 | X₁YYX₂X₃ |
| | | Consensus | (X₁ is S, or D; X₂ is W, or L; X₃ is S, or T) |
| 763 | ATX-P-3370 | HCDR1 | SYYWS |
| 764 | ATX-P-3371 | HCDR1 | SYYWS |
| 765 | ATX-P-3376 | HCDR1 | SYYWS |
| 766 | ATX-P-3420 | HCDR1 | DYYLT |
| 767 | ATX-P-3446 | HCDR1 | SYYWS |
| 768 | ATX-P-3449 | HCDR1 | SYYWS |
| 769 | ATX-P-3451 | HCDR | DYYWT |
| 770 | — | HCDR2 | X₁X₂X₃X₄X₅GX₆TX₇YNPSLKS |
| | | Consensus | (X₁ is Y or E; X₂ is V or I; X₃ is Y or N; X₄ is Y or H; X₅ is S or I; |
| | | | X₆ is Y, F, or S; X₇ is N or K) |
| 771 | ATX-P-3370 | HCDR2 | YVYYSGYTKYNPSLKS |
| 772 | ATX-P-3371 | HCDR2 | YIYYSGFTKYNPSLNS |
| 773 | ATX-P-3376 | HCDR2 | YIYYSGFTKYNPSLKS |
| 774 | ATX-P-3420 | HCDR2 | EINHSGSTNYNPSLKS |
| 775 | ATX-P-3446 | HCDR2 | YVYYSGYTKYNPSLKS |
| 776 | ATX-P-3449 | HCDR2 | YIYYSGFTKYNPSLKS |
| 777 | ATX-P-3451 | HCDR2 | EVNHIGSTNYNPSLKS |
| 778 | ATX-P-3370 | HCDR3 | VESKWNYGPFDI |
| 779 | ATX-P-3371 | HCDR3 | REPRGRYNWNYGPFDI |
| 780 | ATX-P-3376 | HCDR3 | HPRGYNYGPFDY |
| 781 | ATX-P-3420 | HCDR3 | GSEDYYYYMDV |
| 782 | ATX-P-3446 | HCDR3 | VESKWNYGPFAI |
| 783 | ATX-P-3449 | HCDR3 | VDSKWNYGSFHI |
| 784 | ATX-P-3451 | HCDR3 | YSTSWYGWFDP |

VH Family: IGHV4-6

| | | | |
|---|---|---|---|
| 785 | — | HCDR1 | X₁X₂X₃YXAWX₅ |
| | | Consensus | (X₁ is S or N; X₂ is G or N; X₃ is S, K, R, N, or G; X₄ is Y, F, or |
| | | | N; X₅ is S or N) |
| 786 | ATX-P-3367 | HCDR1 | SGSYYWS |
| 787 | ATX-P-3375 | HCDR1 | SGKYFWS |
| 788 | ATX-P-3377 | HCDR1 | SGRYYWS |
| 789 | ATX-P-3436 | HCDR1 | SGSYYWS |
| 790 | ATX-P-3447 | HCDR1 | SGNYYWS |
| 791 | ATX-P-3448 | HCDR1 | SGGYNWN |
| 792 | ATX-P-3450 | HCDR1 | NNRYYWS |
| 793 | — | HCDR2 | YIX₁X₂SGX₃TX₄YNPSLKX₅ |
| | | Consensus | (X₁ is Y or N; X₂ is K, Y, or S; X₃ is F, S, Y, or N; X₄ is N, K, or |
| | | | Y; X₅ is S or N) |
| 794 | ATX-P-3367 | HCDR2 | YIYKSGFTNYNPSLKS |
| 795 | ATX-P-3375 | HCDR2 | YIYYSGSTNYNPSLKN |
| 796 | ATX-P-3377 | HCDR2 | YIYSSGYTNYNPSLKS |
| 797 | ATX-P-3436 | HCDR2 | YIYYSGSTKYNPSLKS |
| 798 | ATX-P-3447 | HCDR2 | YIYSSGSTNYNPSLKS |
| 799 | ATX-P-3448 | HCDR2 | YINYSGNTYYNPSLKS |
| 800 | ATX-P-3450 | HCDR2 | YIYYSGSTNYNPSLKS |
| 801 | ATX-P-3367 | HCDR3 | GGRGYSYGPFDY |
| 802 | ATX-P-3375 | HCDR3 | GGHNWNYAAFDI |
| 803 | ATX-P-3377 | HCDR3 | SRGYRYGPEDY |
| 804 | ATX-P-3436 | HCDR3 | DKGHWNYGAFDI |
| 805 | ATX-P-3447 | HCDR3 | SPRGYSYGPFAY |
| 806 | ATX-P-3448 | HCDR3 | GPLDTAMAPFDY |
| 807 | ATX-P-3450 | HCDR3 | DRPSRYKWNYDAFAI |

VH Family: IGHV2

| | | | |
|---|---|---|---|
| 808 | — | HCDR1 | TSGVGVG |
| | | Consensus | |
| 809 | ATX-P-3406 | HCDR1 | TSGVGVG |
| 810 | ATX-P-3414 | HCDR1 | TSGVGVG |
| 811 | — | HCDR2 | LIYWNX₁X₂X₃X₄YSPSLX₅S |
| | | Consensus | (X₁ is G or D; X₂ is D or V; X₃ is E or K; X₄ is R or F; |
| | | | X₅ is K or Q) |
| 812 | ATX-P-3406 | HCDR2 | LIYWNGDERYSPSLKS |
| 813 | ATX-P-3414 | HCDR2 | LIYWNDVKFYSPSLOS |
| 814 | — | HCDR3 | X₁X₂NWX₃YX₄AFDI |
| | | Consensus | (X₁ is S or G; X₂ is P or D; X₃ is G or N; X₄ is E or R) |
| 815 | ATX-P-3406 | HCDR3 | SPNWGYEAFDI |
| 816 | ATX-P-3414 | HCDR3 | GDNWNYRAFDI |

VL Family: IGKV-1, 6

| | | | |
|---|---|---|---|
| 817 | — | LCDR1 | X₁ASQX₂X₃X₄X₅X₆X₇X₈ |
| | | Consensus | (X₁ is R or Q; X₂ is D, N, T, G, or S; X₃ is V or I; X₄ is S, I, R, G, |
| | | | T, or K; X₅ is T, N, R, or S; X₆ is A, W, F, D, Y, N, or C; X₇ is V |
| | | | or L; X₈ is A, N. G, or H) |
| 818 | ATX-P-1899 | LCDR1 | RASQDVSTAVA |
| 819 | ATX-P-3395 | LCDR1 | RASONIITWLA |
| 820 | ATX-P-3396 | LCDR1 | RASQNIITWLA |
| 821 | ATX-P-3397 | LCDR1 | RASQNIITWLA |
| 822 | ATX-P-3405 | LCDR1 | RASONIITWLA |
| 823 | ATX-P-3406 | LCDR1 | RASONIITWLA |
| 824 | ATX-P-3407 | LCDR1 | RASQNIITWLA |
| 825 | ATX-P-3408 | LCDR1 | RASQNIITWLA |
| 826 | ATX-P-3410 | LCDR1 | RASQNIITWLA |
| 827 | ATX-P-3412 | LCDR1 | RASQNIITWLA |
| 828 | ATX-P-3413 | LCDR1 | RASONIITWLA |
| 829 | ATX-P-3414 | LCDR1 | RASONIITWLA |
| 830 | ATX-P-3418 | LCDR1 | RASOTIRNFLN |
| 831 | ATX-P-3419 | LCDR1 | RASQGIRNDLG |
| 832 | ATX-P-3420 | LCDR1 | RASQSISRYLN |
| 833 | ATX-P-3428 | LCDR1 | RASQGIRNDLG |
| 834 | ATX-P-3430 | LCDR1 | RASQSISNYLN |
| 835 | ATX-P-3431 | LCDR1 | RASQSIGSNLH |
| 836 | ATX-P-3432 | LCDR1 | RASQGISSYLA |
| 837 | ATX-P-3433 | LCDR1 | RASQSITSYLN |
| 838 | ATX-P-3435 | LCDR1 | RASQGIRNDLG |
| 839 | ATX-P-3441 | LCDR1 | RASQSISSYLN |
| 840 | ATX-P-3442 | LCDR1 | RASQTIRSYLN |
| 841 | ATX-P-3448 | LCDR1 | QASQDISNYLN |
| 842 | ATX-P-3451 | LCDR1 | RASODISNYLN |
| 843 | ATX-P-3454 | LCDR1 | QASQDIKNCLN |
| 844 | ATX-P-3458 | LCDR1 | RASQGISSWLA |
| 845 | ATX-P-3462 | LCDR1 | RASOSISSYLN |
| 846 | ATX-P-3466 | LCDR1 | RASQGISNYLA |
| 847 | ATX-P-3469 | LCDR1 | RASQGISNYLA |
| 848 | ATX-P-3470 | LCDR1 | RASQGISNYLA |
| 849 | — | LCDR2 | X₁ASX₂X₃X₄X₅ |
| | | Consensus | (X₁ is S, K, A, Y, T, D, or V; X₂ is F, S, N, Q, or T; X₃ is L, S, or |
| | | | F; X₄ is Y, E, Q, or F; X₅ is S or T) |
| 850 | ATX-P-1899 | LCDR2 | SASFLYS |
| 851 | ATX-P-3395 | LCDR2 | KASSLES |
| 852 | ATX-P-3396 | LCDR2 | KASSLES |
| 853 | ATX-P-3397 | LCDR2 | KASSLES |
| 854 | ATX-P-3405 | LCDR2 | KASSLES |
| 855 | ATX-P-3406 | LCDR2 | KASSLES |
| 856 | ATX-P-3407 | LCDR2 | KASSLES |
| 857 | ATX-P-3408 | LCDR2 | KASSLES |
| 858 | ATX-P-3410 | LCDR2 | KASSLES |
| 859 | ATX-P-3412 | LCDR2 | KASSLES |
| 860 | ATX-P-3413 | LCDR2 | KASSLES |
| 861 | ATX-P-3414 | LCDR2 | KASSLES |
| 862 | ATX-P-3418 | LCDR2 | AASSLQS |
| 863 | ATX-P-3419 | LCDR2 | AASSLQS |
| 864 | ATX-P-3420 | LCDR2 | AASSLQS |
| 865 | ATX-P-3428 | LCDR2 | AASNLOS |
| 866 | ATX-P-3430 | LCDR2 | AASSLQS |
| 867 | ATX-P-3431 | LCDR2 | YASOSFS |
| 868 | ATX-P-3432 | LCDR2 | TASTLOS |
| 869 | ATX-P-3433 | LCDR2 | AASSLQS |
| 870 | ATX-P-3435 | LCDR2 | AASSLQS |
| 871 | ATX-P-3441 | LCDR2 | AASSFOS |
| 872 | ATX-P-3442 | LCDR2 | AASSLQS |
| 873 | ATX-P-3448 | LCDR2 | DASNLET |
| 874 | ATX-P-3451 | LCDR2 | AASSLES |
| 875 | ATX-P-3454 | LCDR2 | DASNLET |
| 876 | ATX-P-3458 | LCDR2 | AASSLQS |
| 877 | ATX-P-3462 | LCDR2 | AASSLQS |
| 878 | ATX-P-3466 | LCDR2 | VASTLOS |
| 879 | ATX-P-3469 | LCDR2 | AASTLOS |
| 880 | ATX-P-3470 | LCDR2 | AASTLOS |
| 881 | ATX-P-1899 | LCDR3 | QQSYATLPT |
| 882 | ATX-P-3395 | LCDR3 | QOYSSYSYT |
| 883 | ATX-P-3396 | LCDR3 | QOYSSYSYT |
| 884 | ATX-P-3397 | LCDR3 | QQYSSYSYT |
| 885 | ATX-P-3405 | LCDR3 | QQYSSYSYT |
| 886 | ATX-P-3406 | LCDR3 | QQYSSYSYT |
| 887 | ATX-P-3407 | LCDR3 | QQYSSYSYT |
| 888 | ATX-P-3408 | LCDR3 | QQYSSYSYT |
| 889 | ATX-P-3410 | LCDR3 | QQYSSYSYT |
| 890 | ATX-P-3412 | LCDR3 | QQYSSYSYT |
| 891 | ATX-P-3413 | LCDR3 | QQYSSYSYT |
| 892 | ATX-P-3414 | LCDR3 | QQYSSYSYT |
| 893 | ATX-P-3418 | LCDR3 | QQTYSIPIT |
| 894 | ATX-P-3419 | LCDR3 | LODYNYPWT |
| 895 | ATX-P-3420 | LCDR3 | QQSYSSPIT |
| 896 | ATX-P-3428 | LCDR3 | LODYNWPWT |
| 897 | ATX-P-3430 | LCDR3 | QQSYSSPLT |
| 898 | ATX-P-3431 | LCDR3 | HOSSSLPRT |
| 899 | ATX-P-3432 | LCDR3 | QQLNGYPPT |
| 900 | ATX-P-3433 | LCDR3 | QQSYSTPLT |
| 901 | ATX-P-3435 | LCDR3 | LODYNWPYT |
| 902 | ATX-P-3441 | LCDR3 | QQSYSNPYT |
| 903 | ATX-P-3442 | LCDR3 | QQSYTTPLT |
| 904 | ATX-P-3448 | LCDR3 | QQANSFPLT |
| 905 | ATX-P-3451 | LCDR3 | QQSYSTPT |
| 906 | ATX-P-3454 | LCDR3 | QQFDNLPLT |
| 907 | ATX-P-3458 | LCDR3 | QQANSFPLT |
| 908 | ATX-P-3462 | LCDR3 | QQSYSTPYT |
| 909 | ATX-P-3466 | LCDR3 | QNYISAPLT |
| 910 | ATX-P-3469 | LCDR3 | QKYISAPLT |
| 911 | ATX-P-3470 | LCDR3 | QDYTSAPLT |

VL Family: IGKV2

| | | | |
|---|---|---|---|
| 912 | — | LCDR1 | RSSQX₁LLHX₂NGYNYLD |
| | | Consensus | (X₁ is S or I; X₂ is S or T) |
| 913 | ATX-P-3426 | LCDR1 | RSSQSLLHSNGYNYLD |
| 914 | ATX-P-3452 | LCDR1 | RSSQILLHINGYNYLD |
| 915 | — | LCDR2 | LGSX1RAS |
| | | Consensus | (X₁ is N or Y) |
| 916 | ATX-P-3426 | LCDR2 | LGSNRAS |
| 917 | ATX-P-3452 | LCDR2 | LGSYRAS |
| 918 | | LCDR3 | MQX₁LQTPX₂T |
| | | Consensus | (X₁ is T or A; X₂ is P or L) |
| 919 | ATX-P-3426 | LCDR3 | MOTLOTPPT |
| 920 | ATX-P-3452 | LCDR3 | MQALQTPLT |

VL Family: IGKV3

| | | | |
|---|---|---|---|
| 921 | — | LCDR1 | RASQSX₁X₂X₃X₄X₅X₆ |
| | | Consensus | (X₁ is V or I; X₂ is S or R; X₃ is S, D, or R; X₄ is Y or S; X₅ is L or |
| | | | Y; X₆ is A, F, or L) |
| 922 | ATX-P-3436 | LCDR1 | RASQSVSSYLA |
| 923 | ATX-P-3440 | LCDR1 | RASQSVRSSYFA |
| 924 | ATX-P-3444 | LCDR1 | RASOSISSSYLA |
| 925 | ATX-P-3446 | LCDR | RASQSVRSSYLA |
| 926 | ATX-P-3447 | LCDR1 | RASOSVSSSYLA |
| 927 | ATX-P-3449 | LCDR1 | RASQSVSSSYLA |
| 928 | ATX-P-3468 | LCDR1 | RASOSVSDSYLA |
| 929 | ATX-P-3471 | LCDR1 | RASOSVSRSYLA |
| 930 | — | LCDR2 | X₁ASX₂RAT |
| | | Consensus | (X₁ is D or G; X₂ is S or N) |
| 931 | ATX-P-3436 | LCDR2 | DASNRAT |
| 932 | ATX-P-3440 | LCDR2 | GASSRAT |
| 933 | ATX-P-3444 | LCDR2 | GASSRAT |
| 934 | ATX-P-3446 | LCDR2 | GASSRAT |
| 935 | ATX-P-3447 | LCDR2 | GASSRAT |
| 936 | ATX-P-3449 | LCDR2 | GASSRAT |
| 937 | ATX-P-3468 | LCDR2 | GASSRAT |
| 938 | ATX-P-3471 | LCDR2 | GASSRAT |
| 939 | — | LCDR3 | QQX₁X₂X₃X₄PX₅T |
| | | Consensus | (X₁ is R or Y; X₂ is S, G, or D; X₃ is N or S; X₄ is W or S; X₅ is L, |
| | | | R, I, Y, F, or W) |
| 940 | ATX-P-3436 | LCDR3 | QQRSNWPLT |
| 941 | ATX-P-3440 | LCDR3 | QQYGSSPRT |
| 942 | ATX-P-3444 | LCDR3 | QQYGSSPIT |
| 943 | ATX-P-3446 | LCDR3 | QQYGSSPYT |
| 944 | ATX-P-3447 | LCDR3 | QQYGSSPFT |
| 945 | ATX-P-3449 | LCDR3 | QQYGSSPYT |
| 946 | ATX-P-3468 | LCDR3 | QQYDSSPFT |
| 947 | ATX-P-3471 | LCDR3 | QQYGSSPWT |

VL Family: IGKV4

| | | | |
|---|---|---|---|
| 948 | — | LCDR1 | KSSQX₁X₂LYX₃SNX₄KNYLA |
| | | Consensus | (X₁ is S or T; X₂ is V or I; X₃ is R or S; X₄ is N or I) |
| 949 | ATX-P-3360 | LCDR1 | KSSQSVLYSSNNKNYLA |
| 950 | ATX-P-3361 | LCDR1 | KSSQSVLYSSNNKNYLA |
| 951 | ATX-P-3362 | LCDR1 | KSSQSVLYSSNNKNYLA |
| 952 | ATX-P-3363 | LCDR1 | KSSQSVLYSSNNKNYLA |
| 953 | ATX-P-3365 | LCDR1 | KSSQSVLYSSNNKNYLA |
| 954 | ATX-P-3366 | LCDR1 | KSSQSVLYSSNNKNYLA |
| 955 | ATX-P-3367 | LCDR1 | KSSQSVLYSSNNKNYLA |
| 956 | ATX-P-3369 | LCDR1 | KSSQSVLYSSNNKNYLA |
| 957 | ATX-P-3370 | LCDR1 | KSSQSVLYSSNNKNYLA |
| 958 | ATX-P-3371 | LCDR1 | KSSOSVLYSSNNKNYLA |
| 959 | ATX-P-3373 | LCDR1 | KSSQSVLYSSNNKNYLA |
| 960 | ATX-P-3375 | LCDR1 | KSSOSVLYSSNNKNYLA |
| 961 | ATX-P-3376 | LCDR1 | KSSQSVLYSSNNKNYLA |
| 962 | ATX-P-3377 | LCDR1 | KSSQSVLYSSNNKNYLA |
| 963 | ATX-P-3378 | LCDR1 | KSSQSVLYSSNNKNYLA |
| 964 | ATX-P-3382 | LCDR1 | KSSQSVLYSSNNKNYLA |
| 965 | ATX-P-3383 | LCDR1 | KSSQSVLYSSNNKNYLA |
| 966 | ATX-P-3384 | LCDR1 | KSSQSVLYSSNNKNYLA |
| 967 | ATX-P-3386 | LCDR1 | KSSQSVLYSSNNKNYLA |
| 968 | ATX-P-3387 | LCDR1 | KSSQSVLYSSNNKNYLA |
| 969 | ATX-P-3389 | LCDR1 | KSSQSVLYSSNNKNYLA |
| 970 | ATX-P-3391 | LCDR | KSSQSVLYSSNNKNYLA |
| 971 | ATX-P-3392 | LCDR | KSSQSVLYSSNNKNYLA |
| 972 | ATX-P-3421 | LCDR1 | KSSQTVLYRSNNKNYLA |
| 973 | ATX-P-3437 | LCDR1 | KSSQSVLYSSNNKNYLA |
| 974 | ATX-P-3438 | LCDR | KSSQSVLYSSNNKNYLA |
| 975 | ATX-P-3450 | LCDR1 | KSSQSVLYSSNNKNYLA |
| 976 | ATX-P-3453 | LCDR1 | KSSQSVLYRSNNKNYLA |
| 977 | ATX-P-3455 | LCDR1 | KSSQTILYRSNIKNYLA |
| 978 | ATX-P-3456 | LCDR1 | KSSQSVLYSSNNKNYLA |
| 979 | ATX-P-3459 | LCDR1 | KSSQSVLYSSNNKNYLA |
| 980 | ATX-P-3463 | LCDR1 | KSSQSVLYSSNNKNYLA |
| 981 | ATX-P-3467 | LCDR1 | KSSQSVLYSSNNKNYLA |
| 982 | ATX-P-3472 | LCDR | KSSQSVLYSSNNKNYLA |
| 983 | — | LCDR2 | WASX₁RES |
| | | Consensus | (X₁ is N or T) |
| 984 | ATX-P-3360 | LCDR2 | WASNRES |
| 985 | ATX-P-3361 | LCDR2 | WASNRES |
| 986 | ATX-P-3362 | LCDR2 | WASNRES |
| 987 | ATX-P-3363 | LCDR2 | WASNRES |
| 988 | ATX-P-3365 | LCDR2 | WASNRES |
| 989 | ATX-P-3366 | LCDR2 | WASNRES |
| 990 | ATX-P-3367 | LCDR2 | WASNRES |
| 991 | ATX-P-3369 | LCDR2 | WASNRES |
| 992 | ATX-P-3370 | LCDR2 | WASNRES |
| 993 | ATX-P-3371 | LCDR2 | WASNRES |
| 994 | ATX-P-3373 | LCDR2 | WASNRES |
| 995 | ATX-P-3375 | LCDR2 | WASNRES |
| 996 | ATX-P-3376 | LCDR2 | WASNRES |
| 997 | ATX-P-3377 | LCDR2 | WASNRES |
| 998 | ATX-P-3378 | LCDR2 | WASNRES |
| 999 | ATX-P-3382 | LCDR2 | WASNRES |
| 1000 | ATX-P-3383 | LCDR2 | WASNRES |
| 1001 | ATX-P-3384 | LCDR2 | WASNRES |
| 1002 | ATX-P-3386 | LCDR2 | WASNRES |
| 1003 | ATX-P-3387 | LCDR2 | WASNRES |
| 1004 | ATX-P-3389 | LCDR2 | WASNRES |
| 1005 | ATX-P-3391 | LCDR2 | WASNRES |
| 1006 | ATX-P-3392 | LCDR2 | WASNRES |
| 1007 | ATX-P-3421 | LCDR2 | WASTRES |
| 1008 | ATX-P-3437 | LCDR2 | WASTRES |
| 1009 | ATX-P-3438 | LCDR2 | WASTRES |
| 1010 | ATX-P-3450 | LCDR2 | WASTRES |
| 1011 | ATX-P-3453 | LCDR2 | WASTRES |
| 1012 | ATX-P-3455 | LCDR2 | WASTRES |
| 1013 | ATX-P-3456 | LCDR2 | WASTRES |
| 1014 | ATX-P-3459 | LCDR2 | WASTRES |
| 1015 | ATX-P-3463 | LCDR2 | WASTRES |
| 1016 | ATX-P-3467 | LCDR2 | WASTRES |
| 1017 | ATX-P-3472 | LCDR2 | WASTRES |
| 1018 | — | LCDR3 | QQX₁X₂X₃TX₄X₅ |
| | | Consensus | (X₁ is Y or F; X₂ is Y or F; X₃ is S, G, or D; X₄ is P or R; X₅ is Y, |
| | | | W, R, T, or P) |
| 1019 | ATX-P-3360 | LCDR3 | QQYYSTPYT |
| 1020 | ATX-P-336] | LCDR3 | QQYYSTPYT |
| 1021 | ATX-P-3362 | LCDR3 | QQYYSTPYT |
| 1022 | ATX-P-3363 | LCDR3 | QQYYSTPYT |
| 1023 | ATX-P-3365 | LCDR3 | QQYYSTPYT |
| 1024 | ATX-P-3366 | LCDR3 | QQYYSTPYT |
| 1025 | ATX-P-3367 | LCDR3 | QQYYSTPYT |
| 1026 | ATX-P-3369 | LCDR3 | QQYYSTPYT |
| 1027 | ATX-P-3370 | LCDR3 | QQYYSTPYT |
| 1028 | ATX-P-3371 | LCDR3 | QQYYSTPYT |
| 1029 | ATX-P-3373 | LCDR3 | QQYYSTPYT |
| 1030 | ATX-P-3375 | LCDR3 | QQYYSTPYT |
| 1031 | ATX-P-3376 | LCDR3 | QQYYSTPYT |
| 1032 | ATX-P-3377 | LCDR3 | QQYYSTPYT |
| 1033 | ATX-P-3378 | LCDR3 | QQYYSTPYT |
| 1034 | ATX-P-3382 | LCDR3 | QQYYSTPYT |
| 1035 | ATX-P-3383 | LCDR3 | QQYYSTPYT |
| 1036 | ATX-P-3384 | LCDR3 | QQYYSTPYT |
| 1037 | ATX-P-3386 | LCDR3 | QQYYSTPYT |
| 1038 | ATX-P-3387 | LCDR3 | QOYYSTPYT |
| 1039 | ATX-P-3389 | LCDR3 | QQYYSTPYT |
| 1040 | ATX-P-3391 | LCDR3 | QQYYSTPYT |
| 1041 | ATX-P-3392 | LCDR3 | QQYYSTPYT |
| 1042 | ATX-P-3421 | LCDR3 | QQYYSTPWT |
| 1043 | ATX-P-3437 | LCDR3 | QQYFGTPRT |
| 1044 | ATX-P-3438 | LCDR3 | QQYYSTPRT |
| 1045 | ATX-P-3450 | LCDR3 | QQYYSTPWT |
| 1046 | ATX-P-3453 | LCDR3 | QQYYGTPRT |
| 1047 | ATX-P-3455 | LCDR3 | QQYYSTRT |
| 1048 | ATX-P-3456 | LCDR3 | QQYYSTPRT |
| 1049 | ATX-P-3459 | LCDR3 | QQYYSTPPT |
| 1050 | ATX-P-3463 | LCDR3 | QQFYDTPRT |
| 1051 | ATX-P-3467 | LCDR3 | QQYYSTPWT |
| 1052 | ATX-P-3472 | LCDR3 | QQYYSTPYT |

TABLE 7
Anti-C3 antibodies (VH sequences)

| SEQ | | | |
|---|---|---|---|
| ID | Antibody | | |
| NO: | Name: | Descriptor: | Sequence: |
| 1053 | ATX-P-3360 | VH nt | CAGGTGCAGCTGCAGGAGTCGGGCCCAGGACTGGTGAAGCCTTC |
| | | | GGGGACCCTGTCCCTCACCTGCGCTGTCTCTGGTGGCTCCATCAG |
| | | | CATTAATAACTGGTGGAGTTGGGTCCGCCAGCCCCCAGGGAAGG |
| | | | GGCTGGAGTGGCTTGGAAAAATCTATCATAGTGGGAACACCGAC |
| | | | TACAACCCGTCCCTCAAGAGTCGAGTCACCATATCAGTAGACAAG |
| | | | TCCAAGAATCAGTTCTCCCTGAGGCTGAGTTCTGTGACCGCCGCG |
| | | | GACACGGCCGTATATTATTGTGCGAGCGGAAGCGATTACGATTTT |
| | | | TGGAGTGGTTATTTGGACTACTGGGGCCAGGGAACCCTGGTCACC |
| | | | GTCTCCTCA |
| 1054 | ATX-P-3362 | VH nt | GAAGTGCAGCTGGTGGAGTCTGGGGGAGGCTTGGTACAGCCTGG |
| | | | CAGGTCCCTGAGACTCTCCTGTGCAGCCTCTGGATTCACCTTTGAT |
| | | | GATTATGCCATGCACTGGGTCCGGCAAGCTCCAGGGAAGGGCCT |
| | | | GGAGTGGGTCTCAGGTATTAGTTGGAATAGTGGTAGCATAGCCTA |
| | | | TGCGGACTCTGTGAAGGGCCGATTCACCATCTCCAGAGACAACGC |
| | | | CAAGAACTCCCTGTATCTGCAAATGAACAGTCTGAGAGTTGAGG |
| | | | ACACGGCCTTTTTTTACTGTGCAAGAGTCGCAGCAGCAGCTGGTA |
| | | | TCCCTTTCTTTGACTACTGGGGCCAGGGAACCCTGGTCACCGTCT |
| | | | CCTCA |
| 1055 | ATX-P-3363 | VH nt | CAGGTGCAGCTGCAGGAGTCGGGCCCAGGACTGGTGAAGCCTTC |
| | | | TGGGACCCTGACCCTCACCTGCGCTGTCTCTGGTGGCTCCATCAA |
| | | | CAGGGATAACTGGTGGAGTTGGGTCCGCCAGCCCCCGGGGAAGG |
| | | | GGCTGGAGTGGATTGGACAAATCTATCAGAGTGGGAGCACCAAC |
| | | | TACAACCCGTCCCTCAAGAGTCGGGTCACCATATCAGTCGACAAG |
| | | | TCCAAGAACCAGTTCTCCCTGAAGCTGAGTTCTGTGACCGCCGCG |
| | | | GACACGGCCGTATATTACTGTGCGAGAGTATATGACTGGAACTAC |
| | | | GGGGGTCACTTTGACTACTGGGGCCAGGGAACCCTGGTCACCGTC |
| | | | TCCTCA |
| 1056 | ATX-P-3365 | VH nt | CAGGTGCAGCTGCAGGAGTCGGGCCCAGGACTGGTGAAGCCTTC |
| | | | GGGGACCCTGTCCCTCACCTGCGCTGTCTCTGGTGACTCCATCAG |
| | | | CAGTAATAACTGGTGGAGTTGGGTCCGCCAGCCCCCAGGGAAGG |
| | | | GGCTGGAGTGGATTGGACAAATCTATCATAGTGGCCACACCAACT |
| | | | ACAACCCGTCCCTCAAGAGTCGAGTCACCATATCGGTTGACATGT |
| | | | CCAAGAACCAGTTCTCCCTGAAGCTGACCTCTGTGACCGCCGCGG |
| | | | ACACGGCCGTGTATTACTGTGCGAGGGGGGCTACAGAAATTCTG |
| | | | GGGTACTTCGATCTCTGGGGCCGTGGCACCCTGGTCACTGTCTCC |
| | | | TCA |
| 1057 | ATX-P-3367 | VH nt | CAGGTGCAGCTGCAGGAGTCGGGCCCAGGACTGGTGAAGCCTTC |
| | | | GGAGACCCTGTCCCTCACCTGCACTGTCTCTGGTGGCTCCGTCAG |
| | | | CAGTGGTAGTTACTACTGGAGCTGGATCCGGCAGCCCCCAGGGA |
| | | | AGGGACTGGAGTGGATTGGATATATCTATAAAAGTGGGTTCACC |
| | | | AATTACAACCCCTCCCTCAAGAGTCGAGTCACCATATCAGTAGAC |
| | | | ACGTCCAAGAACCAGTTCTCCCTGAAGCTGAGCTCTGTGACCGCT |
| | | | GCGGACACGGCCGTGTATTACTGTGCGATAGGGGGACGTGGATA |
| | | | CAGCTATGGTCCTTTTGACTACTGGGGCCAGGGAACCCTGGTCAC |
| | | | CGTCTCCTCA |
| 1058 | ATX-P-3369 | VH nt | CAGGTGCAGCTGGTGCAGTCTGGGGCTGAGGTGAAGAAGCCTGG |
| | | | GGCCTCAGTGAAGGTCTCCTGCAAGGCTTCTGGATACACCTTCAC |
| | | | CGGCTACTATTTACACTGGGTGCGACAGGCCCCTGGACAAGGACT |
| | | | TGAGTGGATGGGATGGATCAACCCTAACAGTGGTGACACAAACT |
| | | | ATGTACAGAACTTTCAGGGCAGGGTCACCATGACCAGGGACACG |
| | | | TCCATCAGCACAGCCTACATGGAGCTGAGCAGGCTGAGATCTGA |
| | | | CGACACGGCCGTGTATTACTGTGCGAGATCCTACGTGGATACCAG |
| | | | CTCGTCGGCTTTTGATATCTGGGGACAAGGGACAATGGTCACCGT |
| | | | CTCTTCA |
| 1059 | ATX-P-3370 | VH nt | CAGGTGCAGCTGCAGGAGTCGGGCCCAGGACTGGTGAAGCCTTC |
| | | | GGAGACCCTGTCCCTCACCTGCACTGTCTCTGGTGGCTCCATCAG |
| | | | TAGTTACTACTGGAGCTGGATCCGGCAGCCCCCCGGGAAGGGAC |
| | | | TGGAGTGGATTGGGTATGTCTATTACAGTGGGTACACCAAGTACA |
| | | | ACCCCTCCCTCAAGAGTCGAGTCACCATATCAGTAGACACGCCCA |
| | | | AGACCCAGTTCTCCCTGAAGATGAGCTCTGTGACCGCTGCGGACA |
| | | | CGGCCGTGTATTACTGTGCGAGCGTCGAATCAAAGTGGAACTACG |
| | | | GGCCTTTTGATATCTGGGGACAAGGGACAATGGTCACCGTCTCTT |
| | | | CA |
| 1060 | ATX-P-3371 | VH nt | CAGGTGCAGCTGCAGGAGTCGGGCCCAGGACTGGTGAAGCCTTC |
| | | | GGAGACCCTGTCCCTCACCTGCACTGTCTCTGGTGACTCCATCAG |
| | | | TAGTTACTACTGGAGCTGGATCCGGCAGCCCCCAGGGAAGGGAC |
| | | | TGGAGTGGATTGGATATATCTATTACAGTGGGTTCACCAAGTACA |
| | | | ACCCCTCCCTCAACAGTCGAGTCACCATATCAGTAGACACGTCCA |
| | | | AGAGCCAGTTCTCCCTGAAGCTGACCTCTGTGACCGCTGCGGACA |
| | | | CGGCCGTGTATTACTGTGCGATGAGAGAGCCGAGAGGCCGGTAT |
| | | | AACTGGAACTACGGGCCTTTTGATATCTGGGGACAAGGGACAAT |
| | | | GGTCACCGTCTCTTCA |
| 1061 | ATX-P-3373 | VH nt | CAGGTGCAGCTGCAGGAGTCGGGCCCAGGACTGGTGAAGCCTTC |
| | | | GGGGACCCTGTCCCTCACCTGCGCTGTCTCTGGTGGCTCCATCAG |
| | | | TAATGATAACTGGTGGAGTTGGGTCCGCCAGCCCCCCGGGAAGG |
| | | | GACTGGAGTGGATTGGGAAAATCTATCATAGTGAGTTCACCAACT |
| | | | ACAACCCGTCCCTCAAGAGTCGAGTCACCATATCAGTAGACAAGT |
| | | | CCAAGAACCAGTTCTCCCTGGAGCTGAACTCTGTGACCGCCGCGG |
| | | | ACACGGCCGTGTATTACTGTGCGAGAGAGTATCATAATTTCATGG |
| | | | ACGTCTGGTGCAAAGGGACCACGGTCACCGTCTCCTCA |
| 1062 | ATX-P-3375 | VH nt | CAGGTGCAGCTGCAGGAGTCGGGCCCAGGACTGGTGAAGCCTTC |
| | | | GGAGACCCTGTCCCTCACCTGCACTGTCTCTGGTGACTCCGTCAG |
| | | | CAGTGGTAAATACTTCTGGAGCTGGATCCGGCAGTCCCCAGGGA |
| | | | AGGGACTGGAGTGGATTGGGTATATCTATTACAGTGGGAGCACC |
| | | | AACTACAACCCCTCCCTCAAGAATCGAGTCACCATATCGGTAGAC |
| | | | ACGTCCAAGAAGGAGTTGTCTCTGAAGCTGAGTTCTGTGACCGCT |
| | | | GCGGACACGGCCGTTTATTACTGTGCGAGAGGAGGGCATAACTG |
| | | | GAACTACGCTGCTTTTGATATCTGGGGACAAGGGACAATGGTCAC |
| | | | CGTCTCTTCA |
| 1063 | ATX-P-3378 | VH nt | CAGGTGCAGCTGCAGGAGTCGGGCCCAGGACTGGTGAAGCCTTC |
| | | | GGGGACCCTGTCCCTCACCTGCGCTGTCTCTGGTGGCTCCATCAG |
| | | | TAATGATAACTGGTGGAGTTGGGTCCGCCAGTCCCCCGGGAAGG |
| | | | GGTTGGAGTGGATTGGGAAAATCTATCATAGTGAGTTCACCAACT |
| | | | ACAACCCGTCCCTCAAGAGTCGAGTCACCATATCAGTAGACAAGT |
| | | | CCAAGAACCAGTTCTCCCTGGAGCTGAGCTCTGTGGCCGCCGCGG |
| | | | ACACGGCCGTGTATTACTGTGCGAGAGAGTATGAGAACTTCATGG |
| | | | ACGTCTGGGGCAAGGGGACCACGGTCACCGTCTCCTCA |
| 1064 | ATX-P-3382 | VH nt | CAGGTGCAGCTGCAGGAGTCGGGCCCAGGACTGGTGAAGCCTTC |
| | | | GGGGACCCTGTCCCTCACCTGCGCTGTCTCTGGTGACTCCATCAG |
| | | | CAGTAATAGCTGGTGGAATTGGGTCCGCCAGCCCCCAGGGAAGG |
| | | | GGCTGGAGTGGATTGGGCAAATCTTTCATAGTGGACACACCAACT |
| | | | ACAACCCGTCCCTCAAGAGTCGAGTCACCATGTCTATAGACAAGT |
| | | | CCAAGAACCAGTTCTCCCTGAAACTGACCTCTGTGACCGCCGCGG |
| | | | ACACGGCCCTGTATTACTGTGCGAGAGGAGGGGAGTATGAAAAC |
| | | | TCGGCGAACTGGTTCGACCCCTGGGGCCAAGGAACCCTGGTCACC |
| | | | GTCTCTTCA |
| 1065 | ATX-P-3383 | VH nt | CAGGTGCAGCTGCAGGAGTCGGGCCCAGGACTGGTGAAGCCTTC |
| | | | GGGGACCCTGTCCCTCACCTGCGCTGTCTCTGGTGTCTCCATCAA |
| | | | CAAGGATAACTGGTGGACTTGGGTCCGCCAGCCCCCAGGGAAGG |
| | | | GGCTGGAGTGGATTGGGAAAATCTATCATAGTGGGAGCACCAAC |
| | | | TACAACCCGTCCCTCAAGAGTCGAGTCACCATATCAGTAGACAAC |
| | | | TCCAAGAACCAATTCTCCCTGAAGCTGAACTCTGTGACCGCCGCG |
| | | | GACACGGCCGTGTATTACTGTACGAGAGGGGGGGATATAGCTAT |
| | | | GGAGGGGGACTGGTTCGCCCCCTGGGGCCAGGGAACCCTGGTCA |
| | | | CCGTCTCCTCA |
| 1066 | ATX-P-3384 | VH nt | CAGGTGCAGCTGCAGGAGTCGGGCCCAGGACTGGTGAAGCCTTC |
| | | | GGGGACCCTGTCCCTCACCTGCGCTGTCTCTGGTGGCTCCATCAG |
| | | | CAGTGATAACTGGTGGAATTGGGTCCGCCAGCCCCCAGGGAAGG |
| | | | GGCTGGAGTGGCTTGGAAAAATCTATCATAGTGGGAACACCGAC |
| | | | TACAACCCGTCCCTCAAGAGTCGAGTCACCATATCAGTAGACAAG |
| | | | TCCAAGAATCAGTTCTCCCTGAGGCTGAGTTCTGTGACCGCCGCG |
| | | | GACACGGCCGTGTATTACTGTGCGAGAGGTGGAACTGAAACTAC |
| | | | GGGGTACATGGACGTCTGGGGCAAAGGGACCACGGTCACCGTCT |
| | | | CCTCA |
| 1067 | ATX-P-3386 | VH nt | CAGGTGCAGCTGCAGGAGTCGGGCCCAGGACTGGTGAAGCCTTC |
| | | | GGGGACCCTGTCCCTCACCTGCGCTGTCTCTGGTGGCTCCATCAG |
| | | | CAATGATAACTGGTGGAGTTGGGTCCGCCAGCCCCCAGGGAAGG |
| | | | GGCTGGAATGGATTGGGAAAATCTATCATAGTGGGTTCACCAACT |
| | | | ACAACCCGTCCCTCAAGAGTCGAGTCACCATATCAGTAGACAAGT |
| | | | CCAAGAACCAGTTCTCCCTGAAGCTGAACTCTGTGACCGCCGCGG |
| | | | ACACGGCCGTGTATTACTGTGCGAGAGGGGGGGATAACTTTATG |
| | | | GAGGGGGAGGGGTTAGGGACCTGGGGCCCGGGAACCCTGGTCAC |
| | | | CGTCTCCTCA |
| 1068 | ATX-P-3387 | VH nt | CAGGTGCAGCTGCAGGAGTCGGGCCCAGGACTGGTGAAGCCTTC |
| | | | GGGGACCCTGTCCCTCACCTGCGCTGTCTCTGGTGGCTCCATCAG |
| | | | CAATGATAACTGGTGGAATTGGGTCCGCCAGTCCCCAGGGAAGG |
| | | | GGCTGGAGTGGATTGGAAAAATCTATCATAGTGGGTTCACCGACT |
| | | | ACAACCCGTCCCTCAAGAGTCGAGTCACCATATCAGTAGACAAGT |
| | | | CCAAGAACCAGTTCTCCCTGAAGCTGAGCTCTGTGACCGCCGCGG |
| | | | ACACGGCCGTGTATTATTGTGCGAGAGGAAACCATAACTATTTGT |
| | | | GGATTGGGTATTTGGGGACCTGGGGCCCGGGAACCCTGGTCACC |
| | | | GTCTCCTCA |
| 1069 | ATX-P-3389 | VH nt | CAGGTGCAGCTGCAGGAGTCGGGCCCAGGACTGGTGAAGCCTTC |
| | | | GGGGACCCTGTCCCTCATCTGCGCTGTCTCTGGTGGCTCCATCAG |
| | | | TAGTAGTAATTGGTGGAGTTGGGTCCGCCAGCCCCCAGGGAAGG |
| | | | GGCTGGAGTGGATTGGGAGAATCTATCATAGTGGGCACACCAAC |
| | | | TACAACCCGTCCCTCAAGAGTCGAGTCACCATATCAGTAGACAAG |
| | | | TCCAAGAACCAGTTCTCCCTGAAGCTGACCTCTGTGACCGCCGCG |
| | | | GACACGGCCGTGTATTACTGTGCGAGAGGGAGGGACTTAACTGG |
| | | | ATACTTTGACTACTGGGGCCAGGGAACCCTGGTCACCGTCTCCTC |
| | | | A |
| 1070 | ATX-P-3391 | VH nt | CAGGTGCAGCTGCAGGAGTCGGGCCCAGGACTGGTGAAACCTTC |
| | | | GGGGACCCTGTCCCTCACCTGCGCTGTCTCTGGTGGCTCCATCAG |
| | | | TAATGATAACTGGTGGAGTTGGGTCCGCCAGTCCCCCGGGAAGG |
| | | | GGCTGGAGTGGATTGGGAAAATCTATCATAGTGAGTTCACCAACT |
| | | | ACAACCCGTCCCTCAAGAGTCGAGTCACCATATCAGTAGACAAGT |
| | | | CCAAGAACCAGTTCTCCCTGGAGCTGAGCTCTGTGACCGCCGCGG |
| | | | ACACGGCCGTATATTACTGTGCGAGAGGGGTCGATTTTTGGAGTG |
| | | | GTTCCCACATGGACGTCTGGGGCAAAGGGACCACGGTCACCGTCT |
| | | | CCTCA |
| 1071 | ATX-P-3392 | VH nt | CAGGTGCAGCTGCAGGAGTCGGGCCCAGGACTGGTGAAGCCTTC |
| | | | GGGGACCCTGTCCCTCACCTGCGCTGTCTCTGGTGGCTCCATCAG |
| | | | TAATGATAACTGGTGGAGTTGGGTCCGCCAGTCCCCCGGGAAGG |
| | | | GGCTGGAGTGGATTGGGAAAATCTATCATAGTGAGTTCACCAACT |
| | | | ACAACCCGTCCCTCAAGAGTCGAGTCACCATATCAGTAGACAAGT |
| | | | CTAAGAACCAGTTTTCCCTGGAACTGAGCTCTGTGACCGCCGCGG |
| | | | ACACGGCCGTGTATTTCTGTGCGCGAGAAGGACTGGAACTACCCC |
| | | | ACATGGACGTCTGGGGCAAAGGGACCACGGTCACCGTCTCCTCA |
| 1072 | ATX-P-3395 | VH nt | GAGGTGCAGCTGGTGGAGTCCGGGGGAGGCGTGGTCAAGCCTGG |
| | | | GGGGTCCCTGAGACTCTCCTGTGCAGCCTCTGGATTCACCTTCAG |
| | | | TAGCTACTGGATGCACTGGGTCCGCCAAGCTCCAGGGAAGGGGC |
| | | | TGGTGTGGGTCTCACGTATTAATAGTGATGGAAGTAGCACAAGCT |
| | | | ACGCGGACTCCGTGCAGGGCCGATTCACCATCTCCAGAGACATCG |
| | | | CCAAGAACACGCTGTATCTGCAAATGAACAGTCTGAGAGCCGAG |
| | | | GACACGGCTGTGTATTACTGTGCAAGAGGGCAGCACCTGGTTCAG |
| | | | GACTATTGGGGCCAGGGAACCCTGGTCACCGTCTCTTCA |
| 1073 | ATX-P-3396 | VH nt | CAGGTGCAGCTGGTGCAGTCTGGGGCTGAGGTGAAGAACCCTGG |
| | | | GGCCTCAGTGAAGGTCTCCTGCAAGGCTTCTGGATACACCTTCAC |
| | | | CGGCTACTATATGCACTGGGTGCGACAGGCCCCTGGACAAGGGC |
| | | | TTGAGTGGATGGGATGGATCAACCCTAACAGTGGTGGCACAAAC |
| | | | TATGCACAGAAGTTTCAGGGCAGGGTCACCATGACCAGGGACAC |
| | | | GTCCATCAGCACAGCCTACATGGAGCTGAGCAGGCTGAGATCTG |
| | | | ACGACACGGCCGTGTATTACTGTGCGAGAGAACGGGGCGACTAT |
| | | | GATGGCGATGCTTTTGATATCTGGGGACAAGGGACAATGGTCACC |
| | | | GTCTCTTCA |
| 1074 | ATX-P-3397 | VH nt | GAGGTGCAGCTGGTGGAGTCTGGGGGAGGCTTGGTCCAGCCTGG |
| | | | GGGGTCCCTGAGACTCTCCTGTGCAGCCTCTGGATTCACCTTTAG |
| | | | TAACTATTACATGAACTGGGTCCGCCAGGCTCCAGGGAAGGGGC |
| | | | TGGAGTGGGTGGCCAACATAAAGCAAGATGGAAGTGAGAAATAC |
| | | | TATGTGGACTCTGTGAAGGGCCGCTTCACCATCTCCAGAGACAAC |
| | | | GCCAAGAACTCACTGTATCTCCAAATGAACAGCCTGAGAGCCGA |
| | | | GGACACGGCTGTGTATTACTGTGCGAGAGATGGGTACTACAACTT |
| | | | CGATGCTTTTGATATCTGGGGACAAGGGACAATGGTCACCGTCTC |
| | | | TTCA |
| 1075 | ATX-P-3405 | VH nt | GAGGTGCAGCTGGTGGAGTCTGGGGGAGGCTTGGTACAGCCTGG |
| | | | GGGGTCCCTGAGACTCTCCTGTGCAGCCTCTGGATTCACCTTCAG |
| | | | TAGCTATAGCATGAACTGGGTCCGCCAGGCTCCAGGGAAGGGGC |
| | | | TGGAGTGGGTCTCATCCATTAGTAGTAGTAGTAGTTACATATACT |
| | | | ACGCAGACTCAGTGAAGGGCCGATTCACCATCTCCAGAGACAAC |
| | | | GCCAAGAACTCACTGTATCTGCAAATGAACAGCCTGAGAGCCGA |
| | | | GGACACGGCCGTGTATTACTGTGCGAGAGAAGGGTATGATAACT |
| | | | GGAACTCTGCTTGTGATATCTGGGGACAAGGGACAATGGTCACC |
| | | | GTCTCTTCA |
| 1076 | ATX-P-3406 | VH nt | CAGATCACCTTGAAGGAGTCTGGTCCTACGCTGGTGAAACCCACA |
| | | | CAGACCCTCACGCTGACCTGCACCTTCTCTGGGTTTTCACTCAGC |
| | | | ACTAGTGGAGTGGGTGTGGGCTGGATCCGTCAGCCCCCAGGAAA |
| | | | GGCCCTGGAGTGGCTTGCACTCATTTATTGGAATGGTGATGAGCG |
| | | | CTACAGCCCATCTCTGAAGAGCAGGCTCACCATCACCAAGGACA |
| | | | CCTCCAAAAACCAAGTGGTCCTTACAATGACCAACATGGACCCTG |
| | | | TGGACACAGCCACATATTACTGTGCACACAGTCCGAACTGGGGAT |
| | | | ATGAAGCTTTTGATATCTGGGGACAAGGGACAATGGTCACCGTCT |
| | | | CTTCA |
| 1077 | ATX-P-3407 | VH nt | GAGGTGCAGCTGGTGGAGTCTGGGGGAGGCCTGGTCCCGCCTGG |
| | | | GGGGTCCCTGAGACTCTCCTGTGCAGCCTCTGGATTCACCTTCAG |
| | | | TAGCTATTGCATGAACTGGGTCCGCCAGGCTCCAGGGAAGGGGC |
| | | | TGGAGTGGGTCTCATCCATTAATAGTGATAGTAGTTACATATACT |
| | | | ACGCGGACTCAGTGAAGGGCCGATTCACCATCTCCAGAGACAAC |
| | | | GCCAAGAACTCACTGTATCTGCAAATGAACAGCCTGAGAGCCGA |
| | | | GGACACGGCTGTGTATTACTGTGCGAGAGAGGGATACTACAACT |
| | | | GGAACGGAGGGAATGACTACTGGGGCCAGGGAACCCTGGTCACC |
| | | | GTCTCCTCA |
| 1078 | ATX-P-3408 | VH nt | GAGGTGCAGCTGGTGGAGTCCGGGGGAGGCTTAGTTCAGCCTGG |
| | | | GGGGTCCCTGAGACTCTCCTGTGCAGCCTCTGGATTCACCTTCAG |
| | | | TAGCTATTGGATGCACTGGGTCCGCCAAGCTCCAGGGAAGGGGC |
| | | | TGGTGTGGGTCTCACATATTAATAGTGATGGGAGTAGCACAAACT |
| | | | ACGCGGACTCCGTGAAGGGCCGATTCACCATCTCCAGAGACAAC |
| | | | GCCAAGAACACGCTGTATCTGCAGATGAACAGTCTGAGATCCGA |
| | | | GGACACGGCTGTATATTACTGTGCAAGAGAGGGTTACTGGAACG |
| | | | GTGATACTTTTGATATCTGGGGACAAGGGACAATGGTCACCGTCT |
| | | | CTTCA |
| 1079 | ATX-P-3410 | VH nt | GAGGTGCAGCTGGTGGAGTCTGGGGGAGGCTTGGTACAGCCTGG |
| | | | GGGGTCCCTGAGACTCTCCTGTGCAGCCTCTGGATTCACCTTCAG |
| | | | TGCCTACGACATGCACTGGGTCCGCCAAACTCCAGGAAAAGGTCT |
| | | | GGAGTGGGTCTCAACTATTGGTACTGCTGGTGACACATACTATCC |
| | | | AGACTCCGTGAAGGGCCGATTCACCATCTCCAGAGATTTTGCCAG |
| | | | GAGGTCCTTGTATCTTCACATGAACAATCTGAGAGCCGGGGACAC |
| | | | GGCTGTATATTACTGTGCAAGAGGGGGCAGCAGCAGCTGGTACG |
| | | | ACTGGTACTTCGATCTCTGGGGCCGTGGCACCCTGGTCACTGTCT |
| | | | CCTCA |
| 1080 | ATX-P-3412 | VH nt | CAGGTGCAGCTGCAGGAGTCGGGCCCAGGACTGGTGAAGCCTTC |
| | | | GGGGACCCTGTCCCTCACCTGCGCTGTCTCTGGTGGCTCCATCAG |
| | | | CAGTAGTACCTGGTGGAGTTGGGTCCGCCAGCCCCCAGGGAAGG |
| | | | GGCTGGAGTGGATTGGGGAAATCTATCATAGTGGGAGCACCAAC |
| | | | TATAACCCGTCCCTCAAGAGTCGAGTCACCATATCACTAGACAAG |
| | | | TCCAAGAACCAGTTTTCCCTGAAGCTGAGCTCTGTGACCGCCGCG |
| | | | GACACGGCCGTGTATTACTGTGCGATTAGTTTATACAACTGGAAC |
| | | | GATGCTGCTTTTGATATCTGGGGACAAGGGACAATGGTCACCGTC |
| | | | TCTTCA |
| 1081 | ATX-P-3413 | VH nt | CAGGTGCAGCTGGTGCAGTCTGGGTCTGAGGTGAAGAAGCCTGG |
| | | | GGCCTCAGTGAAGGTCTCCTGCAAGACTTCTGGATACACGTTCAC |
| | | | CGGCTACTATATGCACTGGGTGCGACAGGCCCCTGGACAAGGGC |
| | | | TTGAGTGGATGGGATGGATCAACCCTAACAGTGGTGGCACAACC |
| | | | TATGCACAGAAGTTTCAGGGCAGGGTCACCATGACCAGGGACAC |
| | | | GTCCATCAGCACAGCCTACATGGAGCTGAACAGGCTGAGATCTG |
| | | | ACGACACGGCCGTGTATTACTGTGCGAGAGAGGCAGGTGGTTCA |
| | | | GGTGAATACTTCCAGCACTGGGGCCAGGGCACCCCGGTCACCGTC |
| | | | TCTTCA |
| 1082 | ATX-P-3414 | VH nt | CAGATCACCTTGAAGGAGTCTGGTCCTACGCTGGTGAAACCCACA |
| | | | CAGACCCTCACGCTGACCTGCACCTTCTCTGGGTTCTCACTCAGC |
| | | | ACTAGTGGAGTGGGTGTGGGCTGGATCCGTCAGCCCCCAGGAAA |
| | | | GGCCCTGGAGTGGCTTGCACTCATTTATTGGAATGATGTTAAGTT |
| | | | CTACAGTCCATCTCTGCAGAGCAGGCTCACCATCACCAAGGACAC |
| | | | CTCCAAAAACCAGGTGGTCCTTACACTGACCAACATGGACCCTGT |
| | | | GGACACAGCCACATATTACTGTGCACACGGGGATAACTGGAACT |
| | | | ACCGTGCTTTTGATATCTGGGGACAAGGGACAATGGTCACCGTCT |
| | | | CTTCA |
| 1083 | ATX-P-3419 | VH nt | CAGGTTCAGCTGGTGCAGTCTGGAGCTGAGGTGAAGAAGCCTGG |
| | | | GGCCTCAGTGAAGGTCTCCTGCAAGGCTTCTGGTTACACCTTTAC |
| | | | CAGCTATGGTATCAGCTGGGTGCGACAGGCCCCTGGACAAGGGC |
| | | | TTGAGTGGATGGGATGGATCAGCGCTTATAATGGTAACACACACT |
| | | | ATGCACAGAACCTCCAGGGCAGAGTCACCATGACCACAGACACA |
| | | | TCCACGAGCACAGCCTACATGGAGCTGAGGAGCCTGAGATCTGA |
| | | | CGACACGGCCGTGTATTACTGTGCGAGGAGTATAGCAGCCCTTGA |
| | | | CTTCTGGGGCCAGGGAACCCCGGTCACCGTCTCCTCA |
| 1084 | ATX-P-3421 | VH nt | CAGGTGCAGCTGCAGGAGTCGGGCCCAGGACTGGTGAAGCCTTC |
| | | | GGGGACCCTGTCCCTCACCTGCGCTGTCTCTGGTGGCTCCATCAG |
| | | | CAGTAATAACTGGTGGAGTTGGGTCCGCCAGCCCCCAGGGAAGG |
| | | | GACTGGAGTGGATTGGACAAATCTATCATAGTGAAAACACCAAC |
| | | | TACAACCCGTCCCTCAAGAGTCGAGTCACCATATCAGTAGACAAG |
| | | | TCCAAGAACCAGTTCTCCCTGAAGCTGAGCTCTGTGACCGCCGCG |
| | | | GACACGGCCATCTATTACTGTGCGAGAGTGGATGACTGGAACTAC |
| | | | GGGGGTCACTTTGACTACTGGGGCCAGGGAACCCTGGTCACCGTC |
| | | | TCCTCA |
| 1085 | ATX-P-3428 | VH nt | CAGGTTCAGCTGGTGCAGTCTGGAGCTGAGGTGAAGAAGCCTGG |
| | | | GGCCTCAGTTAAGGTCTCCTGCAAGGCTTCTGGTTACACCTTTAC |
| | | | CGGCTATGGTATCAGCTGGGTGCGACAGGCCCCTGGACAAGGGC |
| | | | TTGAGTGGATGGGATGGATCAGCGCTTACAATGGTAACACACACT |
| | | | ATGCACAGAACCTCCAGGGCAGAGTCACCATGACCACCGACACA |
| | | | TCCACGAACACAGCCTACATGGAGCTGAGGAGCCTTATATCTGAC |
| | | | GACACGGCCTTTTATTATTGTGCGAGAGCGGGACTGGGGATCGAC |
| | | | TACTGGGGCCAGGGAACCCTGGTCACTGTCTCCTCA |
| 1086 | ATX-P-3430 | VH nt | CAGGTGCAGCTGCAGGAGTCGGGCCCAGGACTGGTGAAGCCTTC |
| | | | GGGGACCCTGTCCCTCACCTGCGCTGTCTCTGGTGGCTCCATCAG |
| | | | CAGTAGTGACTGGTGGAGTTGGGTCCGCCAGTCCCCAGGGAAGG |
| | | | GGCTGGAGTGGATTGGGGAAATCTATCATAGTGGGAGCACCAAC |
| | | | TACAACCCGTCCCTCAAGAGTCGAGTCTCCATATCAGTAGACAAG |
| | | | TCCAAGAACCAGTTCTCCCTGAAGCTGAGCTCTGTGACCGCCGCG |
| | | | GACACGGCCGTGTATTACTGTGCGAGAGGGGGGCACATAGGCTA |
| | | | CTACTACATGGACGTCTGGGGCAAAGGGACCACGGTCACCGTCTC |
| | | | CTCA |
| 1087 | ATX-P-3431 | VH nt | GAGGTGCAGCTGGTGCAGTCTGGAGCAGAGGTGAAAAAGCCCGG |
| | | | GGAGTCTCTGAAGATCTCCTGTAAGGGTTCTGGATACAGCTTTAC |
| | | | CAACTACTGGATCGGCTGGGTGCGCCAGATGCCCGGGAAAGGCC |
| | | | TGGAGTGGATGGGGATCATCTATCCTGGTGACTCTGATACCATAT |
| | | | ACAGCCCGTCCTTCCAAGGCCAGGTCACCTTCTCAGCCGACAAGT |
| | | | CCATCAACACCGCCTACCTGCAGTGGAGCAGCCTGAAGGCCTCG |
| | | | GACACCGCCATGTATTACTGTGCGAGAGGACGTGGATATAGTGG |
| | | | CTACGAAGGTGCTTTTGATATCTGGGGACAAGGGACAATGGTCAC |
| | | | CGTCTCTTCA |
| 1088 | ATX-P-3435 | VH nt | CAGGTTCAGCTGGTGCAGTCTGGAGCTGAGGTGAAGAAGCCTGG |
| | | | GGCCTCAGTGAAGGTCTCCTGCAAGGCTTCTGGTTACACCTTTAC |
| | | | CAACTATGGTATCAGCTGGGTGCGACAGGCCCCTGGACAAGGGC |
| | | | TTGAGTGGATGGGATGGATCAGCGCTTACAATGGTAACACACACT |
| | | | ATGCACAGAAACTCCAGGGCAGAGTCACCATGACCACAGACACA |
| | | | TCCACGAGCACAGCCTACATGGAGCTGAGGAGCCTGAGATCAGA |
| | | | CGACACGGCCGTGTATTACTGTGCGAGAGCGGCAGCAGCCGTTG |
| | | | ACTACTGGGGCCAGGGAACCCTGGTCACCGTCTCTTCA |
| 1089 | ATX-P-3436 | VH nt | CAGGTGCAGCTGCAGGAGTCGGGTCCAGGACTGGTGAAGCCTTC |
| | | | GGAGACCCTGTCCCTCAGTTGCACTGTCTCTGGTGGCTCCGTCAG |
| | | | CAGTGGTAGTTACTACTGGAGCTGGATCCGGCAGCCCCCAGGGA |
| | | | AGGGACTGGAGTGGATTGGGTATATCTATTACAGTGGGAGCACC |
| | | | AAGTACAACCCCTCCCTCAAGAGTCGAGTCACCATATCAGTAGAC |
| | | | ACGTCCAAGAACCAGGTCTCCCTGAAGCTGAGTTCTGTGACCGCT |
| | | | GCGGACACGGCCGTGTATTACTGTGCGAGAGATAAGGGGCACTG |
| | | | GAACTACGGTGCTTTTGATATCTGGGGACAAGGGACAATGGTCAC |
| | | | CGTCTCTTCA |
| 1090 | ATX-P-3437 | VH ni | CAGGTGCAGCTGCAGGAGTCGGGCCCAGGACTGGTGAAGCCTTC |
| | | | GGGGACCCTGTCCCTCACCTGCGCTGTCTCTGGTGGCTCCATCAG |
| | | | CAGTAATAACTGGTGGAGTTGGGTCCGCCAGCCCCCAGGGAAGG |
| | | | GGCTGGAGTGGATTGGGGAAATCTATCATAGTGGAAATATTAACT |
| | | | ACAACCCGTCCCTCAAGAGTCGAGTCACCATATCAGTGGACAAGT |
| | | | CCAAGAACCAGITCTCCCTGAAGCTGAGCTCTGTGACCGCCGCGG |
| | | | ACACGGCCGTGTATTACTGTGCGAGAGGGGGGGAATACGGTGAC |
| | | | CCCGTGGGGTACTTCGATCTCTGGGGCCGTGGCACCCTGGTCACT |
| | | | GTCTCCTCA |
| 1091 | ATX-P-3440 | VH nt | CAGGTTCAGCTGGTGCAGTCTGGAGCTGAGGTGAAGAAGCCTGG |
| | | | GGCCTCAGTGAAGGTCTCCTGCAAGGCTTCTGGTTACACCTTTAC |
| | | | CACCTATGGTATCAGCTGGGTGCGACAGGCCCCTGGACAAGGGC |
| | | | TTGAGTGGATGGGATGGATCAGCGCTTACAGTGGTAACACAAAC |
| | | | TATGCACAGAAGCTCCAGGGCAGAGTCACCATGACCACAGACAC |
| | | | ATCCACGAGCACAGCCTACATGGAGCTGAGGAGCCTGAGATCTG |
| | | | ACGACACGGCCGTGTATTACTGTGCGAGAGAGAGAGTCTCCAAC |
| | | | TGGGTCTTTGACTTCTGGGGCCAGGGAACCCTGGTCACTGTCTCC |
| | | | TCA |
| 1092 | ATX-P-3442 | VH nt | CAGGTGCAGCTGCAGGAGTCGGGCCCAGGACTGGTGAAGCCTTC |
| | | | GGGGACCCTGTCCCTCACCTGCGCTGTCTCTGGTGGTTCCATCAG |
| | | | CAGTAGTGACTGGTGGAGCTGGGTCCGCCAGCCCCCAGGGAAGG |
| | | | GGCTGGAGTGGATTGGGGAAATCTATCATAGTAGGAACACCAAC |
| | | | TACAACCCGTCCCTCAAGAGTCGAGTCACCATATCAGTAGACAAG |
| | | | TCCAAGAACCAGTTCTCCCTGAAGCTGAGTTCTGTGACCGCCGCG |
| | | | GACACGGCCGTGTATTACTGTGCGAGTGGAGGTGTGGTGGCCGA |
| | | | CTACTACATGGACGTCTGGGGCAAAGGGACCACGGTCACCGTCTC |
| | | | CTCA |
| 1093 | ATX-P-3444 | VH nt | GAGGTGCAGCTGGTGGAGTCTGGGGGAGGCCTGGTCAAGCCTGG |
| | | | GGGGTCCCTGAGACTCTCCTGTGCAGCCTCTGGATTCACCTTCAG |
| | | | TAGCTATGGCATGAACTGGGTCCGCCAGGCTCCAGGGAAGGGGC |
| | | | TGGAGTGGGTCTCATCCATTAGTGGTTATGGTAGTTACATATACT |
| | | | ACGCAGCCTCAGTGAAGGGCCGATTCACCATCTCCAGAGACAGC |
| | | | GCCAAGAACTCACTGTATCTGCAAATGAACAGCCTGAGCGCCGA |
| | | | GGACACAGCTGTGTATTACTGTGCGAGAGAATTAGGTGGGATCTA |
| | | | CTACGGGGTAGGGTACTTCGATCTCTGGGGCCGTGGCACCCTGGT |
| | | | CACTGTCTCCTCA |
| 1094 | ATX-P-3447 | VH nt | CAGGTGCAGCTGCAGGAGTCGGGCCCAGGACTGGTGAAGCCTTC |
| | | | GGAGACCCTGTCCCTCACCTGCGCTGTCTCTGGTGGCTCCGTCAG |
| | | | CAGTGGTAATTACTATTGGAGCTGGATCCGGCAGCCCCCAGGGA |
| | | | AGGGACTGGAGTGGATTGGGTATATCTATTCCAGTGGGAGCACC |
| | | | AACTACAACCCCTCCCTCAAGAGTCGAGTCACCATATCAATAGAC |
| | | | ACGTCCAAGAACCAGTTCTCCCTGAAGCTGAGCTCTGTGACCGCT |
| | | | GCGGACACGGCCGTGTATTACTGTGCGAGAAGTCCTCGTGGATAC |
| | | | AGCTATGGTCCCTTTGCCTACTGGGGCCAGGGGACCCTGGTCACC |
| | | | GTCTCTTCA |
| 1095 | ATX-P-3448 | VH nt | CAGGTGCAGCTGCAGGAGTCGGGCCCAGGACTGGTGAAGCCTTC |
| | | | ACAGACCCTGTCCCTCACCTGCACTGTCTCTGGTGGCTCCATCAG |
| | | | CAGTGGTGGTTACAACTGGAACTGGATCCGCCAGCACCCAGGGA |
| | | | AGGGCCTGGAATGGATTGGGTACATCAATTACAGTGGGAATACC |
| | | | TATTACAACCCGTCCCTCAAGAGTCGAGTTACCATATCAGTAGAC |
| | | | ACGTCTAAGAACCAGTTCTCCCTGAAGCTGAGTTCTGTGACTGCC |
| | | | GCGGACACGGCCGTTTATTACTGTGCGAGAGGGCCCCTGGATACA |
| | | | GCTATGGCCCCCTTTGACTACTGGGGCCAGGGAACCCTGGTCACC |
| | | | GTCTCCTCA |
| 1096 | ATX-P-3449 | VH nt | CAGGTGCAGCTGCAGGAGTCGGGCCCAGGACTGGTGAAGCCTTC |
| | | | GGAGACCCTGTCCCTCACCTGTACTGTCTCTGGTGACTCCATCAG |
| | | | TAGTTACTACTGGAGTTGGATCCGGCAGCCCCCAGGGAAGGGAC |
| | | | TGGAGTGGATTGGATATATCTATTATAGTGGGTTCACCAAGTACA |
| | | | ACCCCTCCCTCAAGAGTCGAGTCACCATTTCAGTAGACACGTCCA |
| | | | AGAACCAGTTCTCCCTGAGGCTGAGCTCTGTGACCGCTGCGGACA |
| | | | CGGCCGTGTATTACTGTGCGAGCGTCGATTCAAAGTGGAACTACG |
| | | | GGTCTTTTCATATCTGGGGACAAGGGACAATGGTCACCGTCTCTT |
| | | | CA |
| 1097 | ATX-P-3450 | VH nt | CAGGTGCAGCTGCAGGAGTCGGGCCCAGGGCTGGTGAAGCCTTC |
| | | | GGAGACCCTGTCCCTCACCTGCTCTGTCTCTGGTGACTCCGTCAG |
| | | | CAATAATCGTTATTATTGGAGCTGGATTCGGCAGCCCCCAGGGAA |
| | | | GGGACTGGAGTGGATTGGGTATATCTATTACAGTGGGAGCACCA |
| | | | ACTACAACCCCTCCCTCAAGAGTCGAGTCACCATATCAGTAGACA |
| | | | CGTCCAAGAACCAGTTGTCCCTGAACCTGAGTTCTGTGACCGCTG |
| | | | CGGACACGGCCGTGTATTACTGTGCGAGAGATCGCCCATCCCGGT |
| | | | ATAAGTGGAATTACGATGCTTTTGCTATCTGGGGACAAGGGACAA |
| | | | TGGTCACCGTCTCTTCA |
| 1098 | ATX-P-3451 | VH nt | CAGGTGCAGCTACAGCAGTGGGGCGCAGGACTGTTGAAGCCTTC |
| | | | GGAGACCCTGTCCCTCACCTGCGCTGTCTATGGTGGGTCCTTCAG |
| | | | TGATTACTACTGGACCTGGATCCGCCAGCCCCCAGGGAAGGGGCT |
| | | | GGAGTGGATTGGTGAAGTCAATCATATTGGAAGCACCAACTACA |
| | | | ACCCGTCCCTCAAGAGTCGAGTCACCATATCAGTAGACACGTCCA |
| | | | AGAACCAGTTCTCCCTGAACCTGAGCTCTGTGACCGCCGCGGACA |
| | | | CGGCTGTGTATTACTGTGCGAAGTATAGCACTTCCTGGTACGGCT |
| | | | GGTTCGACCCCTGGGGCCAGGGAACCCTGGTCACTGTCTCCTCA |
| 1099 | ATX-P-3453 | VH nt | CAGGTGCAGCTGCAGGAGTCGGGCCCAGGGCTGGTGAAGCCTTC |
| | | | GGGGACCCTGTCCCTCACCTGCGCTGTCTCTGGTGACTCCATCAG |
| | | | CAGTAATAACTGGTGGAGTTGGTTCCGCCAGCCCCCAGGGAAGG |
| | | | GACTGGAGTGGATTGGGAGAATCTATCATAGTGGGACCACCAAC |
| | | | TACAACCCGTCCCTCGAGAGTCGAGTCACCATATCAGTAGACAAC |
| | | | TCCAGGAACCAGTTCTCCCTGAAACTGAGCTCTGTGACCGCCGCG |
| | | | GACACGGCCGTGTATTACTGTGCGAGAGGCGAGGAGTGGGAGCT |
| | | | GCGGGGAGGTGTTTTTGATATCTGGGGACAAGGGACAATGGTCA |
| | | | CCGTCTCTTCA |
| 1100 | ATX-P-3454 | VH nt | CAGGTGCAGCTGGTGCAATCTGGGCCTGAGTTGAAGAAGCCTGG |
| | | | GGCCTCAGTAAAGGTTTCCTGCAAGGCTTCTGGATACACCTTCAC |
| | | | TAACTATGCTGTGAATTGGGTGCGACAGGCCCCTGGACAAGGGCT |
| | | | TGAGTGGATGGGATGGATCAACACCAACACTGGGCACCCAACGT |
| | | | ATGCCCAGGGCTTCACAGGACGGTTTGTCTTCTCCTTGGACACCT |
| | | | CTGTCAGTACGGCATATCTGCAGATCAGCAGCCTAAAGGCTGAG |
| | | | GACACTGCCGTTTATTACTGTGCGAGAGACAGCAGCAGCTGGGG |
| | | | CTACTGGGGCCAGGGAACCCTGGTCACTGTCTCCTCA |
| 1101 | ATX-P-3455 | VH nt | CAGGTGCAGCTGCAGGAGTCGGGCCCAGGACTGGTGACGCCTTC |
| | | | GGGGACCCTGTCCCTCACCTGCGCTGTCTCTGGTGACTCCATCAG |
| | | | TAGTGATAACTGGTGGAGTTGGGTCCGCCAGCCCCCAGGGAAGG |
| | | | GACTGGAGTGGATTGGGGAAATCTATCACAGTGAAAACACCAAC |
| | | | TACAACCCGTCCCTCAAGAGTCGAGTCACCATATCAGTAGACAAG |
| | | | TCCAAGAACCAGTTCTCCCTGAGGCTGAACTCTGTGACCGCCGCG |
| | | | GACACGGCCATGTATTACTGTGCGAGAGGGAGGGAGCTAACTGG |
| | | | CCTCTTTGACTACTGGGGCCAGGGAACCCTGGTCACCGTCTCCTC |
| | | | A |
| 1102 | ATX-P-3456 | VH nt | CAGGTGCAGCTGCAGGAGTCGGGCCCAGGACTGGTGAAGCCTTC |
| | | | GGGGACCCTGTCCCTCACCTGCGCTGTCTCTGGTGGCTCCATCAG |
| | | | CAGTAATAACTGGTGGAGTTGGGTCCGCCAGCCCCCAGGAAAGG |
| | | | GACTGGAATGGATTGGGGACATCTATCATAGTGGAAACACCAAC |
| | | | TACAACCCGTCCCTCAAGAGTCGAGTCACCCTATCAGTAGACATG |
| | | | TCCAAGAACCAGTTCTCCCTGAAACTGAACTCTGTGACCGCCGCG |
| | | | GACACGGCCGTGTATTACTGTGCGAGAGGAGGTATAGCAGTGAC |
| | | | TGCCTACTTTGACTACTGGGGCCAGGGAACCCTGGTCACCGTCTC |
| | | | CTCA |
| 1103 | ATX-P-3458 | VH nt | CAGGTGCAGCTGGTGCAGTCTGGGGCTGAGGTGAAGAAGCCTGG |
| | | | GGCCTCAGTGAAGGTCTCCTGCAAGGCTTCTGGATACACCTTCAC |
| | | | CGGCTACTATTTGCACTGGGTGCGACAGGCCCCTGGACAAGGGCT |
| | | | TGAGTGGATGGGATGGATCAACCCTCACAGTGGTGGCACAATCT |
| | | | ATGCACAGAAGTTTCAGGACAGGGTCACCATGACCAGGGACACG |
| | | | TCCATCAGCACAGCCTACATGGAGCTGAGCAGGCTGAGATCTGA |
| | | | CGACACGGCCGTGTATTACTGTGCGAACTGGAACTCCGGGGACTC |
| | | | CTACTACTACTACATGGACGTCTGGGGCAAAGGGACCACGGTCA |
| | | | CCGTCTCCTCA |
| 1104 | ATX-P-3459 | VH nt | CAGGTGCAGCTGCAGGAGTCGGGCCCAGGACTGGTGAAGCCTTC |
| | | | GGGGACCCTGTCCCTCACCTGCGCTGTCTCTGGTGGTTCCATCAG |
| | | | CAGTGATAACTGGTGGAATTGGGTCCGCCAGCCCCCAGGGAAGG |
| | | | GGCTGGAGTGGATTGGAAAAATCTATCATAGTGGGAACACCAAC |
| | | | TACAACCCGTCCCTCAAGAGTCGAGTCACCATATCAGTAGACGAG |
| | | | TCCAAGAACCAGTTCTCCCTGAGGCTGTACTCTGTGACCGCCGCG |
| | | | GACACGGCCGTGTATTACTGTGCGAGAGGGGTCGATTTTTGGAGT |
| | | | GGTTCCCACATGGACGTCTGGGGCAAAGGGACCACGGTCACCGT |
| | | | CTCCTCA |
| 1105 | ATX-P-3462 | VH nt | CAGGTGCAGCTGCAGGAGTCGGGCCCAGGACTGGTGAAGCCTTC |
| | | | GGGGACCCTGTCCCTCACCTGCGCTGTCTCTGGTGGCTCCATTAG |
| | | | CAGTAATAATTGGTGGAGTTGGGTCCGCCAGGCCCCAGGGAAGG |
| | | | GGCTGGAGTGGATTGGGAAGATCTATCAAAGTGGGAGCACCATG |
| | | | TACAACCCGTCCCTCAAGAGTCGAGTCACCATGTCGGTAGACAAG |
| | | | TCCAAGAACCAGTTCTCCCTGATTCTGAGTTCTGTGACCGCCGCG |
| | | | GACACGGCCGTGTATTACTGTGCGAGAGATAAACCCCCTTTACTG |
| | | | GGAGCCTTTGACTACTGGGGCCAGGGAACCCTGGTCACTGTCTCC |
| | | | TCA |
| 1106 | ATX-P-3463 | VH nt | CAGGTGCAGCTGGTGGAGTCTGGGGGAGGCGTGGTCCAGCCTGG |
| | | | GAGGTCCCTGAGACTCTCCTGTGCAGCCTCTGGATTCACCTTCAG |
| | | | TAGCTATGCCATGCACTGGGTCCGCCAGGCTCCAGGCAAGGGGCT |
| | | | GGAGTGGGTGGCAGTTATATCATATGATGGAAGTAATAAATACT |
| | | | ATGCGGACTCCGTGAAGGGCCGATTCACCATCTCCAGAGACAATT |
| | | | CCAAGAACACGCTGTCTCTGCAAATGAACAGCCTGAGAGCTGAG |
| | | | GACACGGCTGTGTATTACTGTGCGAAAAGGGGGGGATACAGCTA |
| | | | TGGTCCTTTTGAACACTGGGGCCAGGGAACCCTGGTCACCGTCTC |
| | | | CTCA |
| 1107 | ATX-P-3466 | VH nt | CAGGTGCAGCTGGTGCAATCTGGGTCTGAATTGAAGAAGCCTGG |
| | | | GGCCTCAGTGAAGGTTTCCTGCAAGGCTTCTGGATACACCTTCAC |
| | | | TAGCTATACTATGAATTGGGTGCGACAGGCCCCTGGACAAGGGCT |
| | | | TGAGTGGGTGGGATGGATCAACACCGCCACTGGGACCCCAACGT |
| | | | ATGCCCAGGGCTTCACAGGACGGTATGTCTTCTCCTTGGACACCT |
| | | | CTGTCAGCACGGCTTATCTGCAGATCAGCGGCCTAAAGGCTGAGG |
| | | | ACACTGCCGTGTATTTCTGTGCGAGGTATAGTGGGAGCCACTCCT |
| | | | TTGACTACTGGGGCCAGGGAACCCTGGTCACCGTCTCTTCA |
| 1108 | ATX-P-3467 | VH nt | CAGGTGCAGCTGCAGGAGTCGGGCCCAGGACTGGTGAAGCCTTC |
| | | | GGGGACCCTGTCCCTCACCTGCGCTGTCTCTGGTGGCTCCATCAG |
| | | | TAGTGATTACTGGTGGAGTTGGGTCCGCCAGTCCCCAGGGAAGG |
| | | | GGCTGGAGTGGATTGGGAAAATCTATCATAGTGGGAACACCAAC |
| | | | CACAACCCGTCCCTCAAGAGTCGAGTCACCATATCAATAGACAA |
| | | | GTCCAGGAACCAGTTCTCCCTGAATCTGAACTCTGTGACCGCCGC |
| | | | GGACACGGCCGTGTATTACTGTGCGAGAGAAGGACTGGAACTTC |
| | | | CCCACATGGACGTCTGGGGCAAAGGGACCACGGTCACCGTCTCCT |
| | | | CA |
| 1109 | ATX-P-3468 | VH nt | CAGGTGCAGCTGGTGGAGTCTGGGGGAGGCTTGGTCCAGCCTGG |
| | | | GAGGTCCCTGAGACTCTCCTGTGCAGCCTCTGGATTCACCTTCAG |
| | | | TAGTTATGCTATGCACTGGGTCCGCCAGGCTCCAGGCAAGGGGCT |
| | | | GGAGTGGGTGACAGTTATATCATATGATGGAAGTAATAAATACT |
| | | | ATGCAGACTCCGTGAAGGGCCGATTCACCATCTCCAGAGACAATT |
| | | | CCAAGAACACGCTGTATCTGCAAATGAACAGCCTGAGAGCTGAG |
| | | | GACACGGCTGTGTATTACTGTGCGAAAAGGGGTAACTGGAACTA |
| | | | CGGACCTTTTCACTACTGGGGCCAGGGAACCCTGGTCACTGTCTC |
| | | | CTCA |
| 1110 | ATX-P-3469 | VH nt | CAGGTGCAGCTGGTGGAGTCTGGGGGAGGCGTGGTCCAGCCTGG |
| | | | GAGGTCCCTGAGACTCTCCTGTGCAGCCTCTGGATTCACCTTCAG |
| | | | TGCCTATGCCATCCACTGGGTCCGCCAGGCTCCAGGCAAGGGGCT |
| | | | GGAGTGGGTGGCAGTTATATCATATGATGGAAGTAATAAAAAGT |
| | | | ATGCAGACTCCGTGAAGGGCCGATTCACCATCTCCAGAGACAATT |
| | | | CCAAGAACACGCTGGATCTGGAAATGAACAGCCTGAGAGCTGAG |
| | | | GACACGGCTGTGTACTACTGTGCGAAAGGGCTACCTTTTGACTAC |
| | | | TGGGGCCAGGGAACCCTGGTCACCGTCTCCTCA |
| 1111 | ATX-P-3470 | VH nt | CAGGTGCAGCTGGTGCAATCTGGGTCTGACTTGAAGAAGCCTGG |
| | | | GGCCTCAGTGAAGGTTTCCTGCAAGGCTTCTGGATACACCTTCAC |
| | | | TAGTTATACTATGAATTGGGTGCGACAGGCCCCTGGACAAGGGCT |
| | | | TGAGTGGATGGGATGGATCAACACCAACACTGGGACCCCAACGT |
| | | | ATGCCCAGGGCTTCACAGGACGGTTTGTCTTCTCCTTGGACACCT |
| | | | CTGTCAGCACGGCATATCTGCAGATCAGCAGCCTAAAGGCTGAG |
| | | | GACACTGCCGTGTATTACTGTACGAGGTATACTGGGAACTACTCC |
| | | | TTTGACTACTGGGGCCAGGGAACCCTGGTCACCGTCTCCTCA |
| 1112 | ATX-P-3471 | VH nt | GAGGTGCAGCTGGTGGAGTCTGGGGGAGTCTTGGTACAGCCTGG |
| | | | GGGGTCCCTGAGACTCTCCTGTGCAGCCTCTGGATTCACCTTTAG |
| | | | GAGCTATGCCATGAGCTGGGTCCGCCAGGCTCCAGGGAAGGGGC |
| | | | TGGAGTGGGTCTCAGCTATTAGTGGTAGTGGTGATAGCACATACT |
| | | | TCGCAGACTCCGTGAAGGGCCGGTTCACCATCTCCAGAGACAATT |
| | | | CCAAGAACACGCTGTCTCTGCAAATGAACAGCCTGAGAGCCGAG |
| | | | GACACGGCCGTATATTACTGTGCGAGCATCCTAGGATATTGTAGT |
| | | | GGTACCAGCTGCTATGGCCTCTTTGACAACTGGGGCCAGGGAACC |
| | | | CTGGTCACCGTCTCCTCA |
| 1113 | ATX-P-3472 | VH nt | CAGGTGCAGCTGCAGGAGTCGGGCCCAGGACTGGTGAAGCCTTC |
| | | | GGGGACCCTGTCCCTCACCTGCGCTGTCTCTGGTGGCTCCATCAG |
| | | | TAATGATAACTGGTGGAGTTGGGTCCGCCAGTCCCCCGGGAAGG |
| | | | GGCTGGAGTGGATTGGGAAAATCTATCATAGTGAGTTCACCAACT |
| | | | ACAACCCGTCCCTCAGGAGTCGAGTCACCATATCAGTAGACAAGT |
| | | | CCAAGAACCAGTTCTCCCTGGAGCTGACCTCTGTGACCGCCGCGG |
| | | | ACACGGCCGTGTATTACTGTGCGAGAGAGTATCAGAACTACATG |
| | | | GACGTCTGGGGCAAAGGGACCACGGTCACCGTCTCCTCA |
| 1114 | ATX-P-3361 | VH nt | CAGGTGCAGCTGCAGGAGTCGGGCCCAGGACTGGTGAAGCCTTC |
| | | | GGGGACCCTGTCCCTCACCTGCGTTGTCTCTGGTGACTCCATCAG |
| | | | CAGTAATAACTGGTGGAGTTGGGTCCGCCAGCCCCCAGGGAAGG |
| | | | GTCTGGAGTGGATTGGACAAATCTATCATAGTGGAATCACCAACT |
| | | | ACAACCCGTCCCTCAAGAGTCGAGTCACCATATCAGTAGACAAGT |
| | | | CCAAGAACCAGTTCTCCCTGGAGCTGACCTCTGTGACCGCCGCGG |
| | | | ACGCGGCCGTGTATTACTGTGCGAGGGCCCAGTGGGAACTACGA |
| | | | GCGGGCTGGTTCGACCCCTGGGGCCAGGGAACCCTGGTCACCGTC |
| | | | TCCTCA |
| 1115 | ATX-P-3366 | VH nt | GAGGTGCAGCTGGTGGAGTCTGGGGGAGGCTTGGTAAAGCCTGG |
| | | | GGGGACCCTTACACTCTCCTGTGCAGCCTCTGGATTCACTTTCAGT |
| | | | AACGCCTGGATGAGCTGGGTCCGCCAGGCTCCAGGGAAGGGGCT |
| | | | GGAGTGGGTTGGCCGTATTAAAAGCAAAACTGATGGCGGGACAA |
| | | | CAGACTACGCTGCACCCGTGAAAGGCAGATTCACCATCTCAAGA |
| | | | GATGATTCAAAAAACACGCTGTATCTGCAAATGAACAGCCTGAA |
| | | | AACCGAGGACACAGCCGTGTATTACTGTACCCCCCGGTACAACTC |
| | | | GGACTTTGACTACTGGGGCCAAGGAACCCTGGTCACCGTCTCTTC |
| | | | A |
| 1116 | ATX-P-3376 | VH nt | CAGGTGCAGCTGCAGGAGTCGGGCCCAGGACTGGTGAAGCCTTC |
| | | | GGAGACCCTGTCCCTCACCTGCACTGTCTCTGGTGGCTCCATCAG |
| | | | TAGTTACTACTGGAGCTGGATCCGGCAGCCCCCAGGGAAGGGAC |
| | | | TGGAGTGGATTGGGTATATCTATTACAGTGGGTTCACCAAGTACA |
| | | | ACCCCTCCCTCAAGAGTCGAGTCACCATATCAGTAGACACGTCCA |
| | | | AGAACCAGTTCTCCCTGAAGCTGAGCTCTGTGACCGCTGCGGACA |
| | | | CGGCCGTGTATTACTGTGCGACCCACCCTCGTGGATACAACTATG |
| | | | GTCCCTTTGACTACTGGGGCCAGGGAACCCTGGTCACTGTCTCCT |
| | | | CA |
| 1117 | ATX-P-3377 | VH nt | CAGGTGCAGCTGCAGGAGTCGGGCCCAGGACTGGTGAAGCCTTC |
| | | | GGAGACCCTGTCCCTCACCTGCACTGTCTCTGGTGGCTCCGTCAA |
| | | | CAGTGGTCGTTACTACTGGAGCTGGATCCGGCAGCCCCCAGGGA |
| | | | AGGGACTGGAGTGGATTGGGTATATCTATTCCAGTGGGTACACCA |
| | | | ACTACAACCCCTCCCTCAAGAGTCGAGTCACCATGTTACTAGACA |
| | | | CGTCCAAGAACCAGTTCTCCCTGAAGCTGAACTCCGTGACCGCTG |
| | | | CGGACACGGCCGTGTATTACTGTGCGAGGTCACGTGGATACCGCT |
| | | | ATGGTCCCTTTGACTACTGGGGCCAGGGAACCCTGGTCACCGTCT |
| | | | CCTCA |
| 1118 | ATX-P-3418 | VH nt | CAGGTGCAGCTGGTGCAATCTGGGTCTGAGTTGAAGAAGCCTGG |
| | | | GGCCTCAGTGAAGGTTTCCTGCGAGGCTTCTGGATACACCTTCAC |
| | | | TAGCTATGCTATGAATTGGGTGCGACAGGCCCCTGGACAAGGGCT |
| | | | TGAGTGGATGGGATGGATCAACACCAACACTGGGACCCCAACTT |
| | | | ATGCCCAGGGCTTCACAGGACGGTTTGTCTTCTCCTTGGACACCT |
| | | | CTGTCAGCACGGCATATCTGCAGATCAGCAGCCTAAAGGCTGAG |
| | | | GACACTGCCGTGTATTACTGTGCGAGTCATAGCACCTCGTTTGAC |
| | | | TACTGGGGCCAGGGGACCCTGGTCACCGTCTCCTCA |
| 1119 | ATX-P-3420 | VH nt | CAGGTGCAGCTACAGCAGTGGGGCGCAGGACTGGTGAAGCCTTC |
| | | | GGAGACCCTGTCCCTCACCTGCGCTGTCCATGGTGGGTCCTTCAG |
| | | | TGATTACTACTTGACCTGGATTCGCCAGCCCCCAGGGAAGGGGCT |
| | | | GGAGTGGATTGGGGAAATCAATCATAGTGGAAGCACCAACTACA |
| | | | ACCCCTCCCTCAAGAGTCGAGTCACCTTATCAATAGACACGTCCA |
| | | | AGAACCAGTTCTCCCTGAAGCTGAGCTCTGTGACCGCCGCGGACA |
| | | | CGGCTGTGTATTACTGTGCGAGAGGTAGTGAAGACTACTACTATT |
| | | | ACATGGACGTCTGGGGCAAAGGGACCACGGTCACCGTCTCCTCA |
| 1120 | ATX-P-3426 | VH nt | GAGGTGCAGCTGGTGCAGTCTGGAGCAGAGGTGAAAAAGCCCGG |
| | | | GGAGTCTCTGAAGATCTCCTGTAAGGGTTCTGGATACATCTTTAC |
| | | | CAGCTACTGGATCGGCTGGGTGCGCCAGATGCCCGGGAAAGGCC |
| | | | TGGAGTGGATGGGGATCATCTATCCTGGTGACTCTGATACCAGAT |
| | | | ACAGCCCGTCTTTCCAAGGCCAGGTCACCATCTCAGCCGACAAGT |
| | | | CCATCATCACCGCCTACCTGCAGTGGAGCAGCCTGAAGGCCTCGG |
| | | | ACACCGCCATGTATTACTGTGCGAGACACGACTACTTTGATATTG |
| | | | GAGGTTATTTTGACTACTGGGGCCAGGGAACCCTGGTCACCGTCT |
| | | | CCTCA |
| 1121 | ATX-P-3432 | VH nt | CAGGTGCAGCTGGTGCAGTCTGGGGCTGAGGTGAAGAAGCCTGG |
| | | | GGCCTCAGTGAAGGTCTCCTGCAAGGCTGATGGATACACCTTCAC |
| | | | CGACTACTATATGCACTGGGTGCGACAGGCCCCTGGACAAGGGC |
| | | | ATGAGTGGATGGGATGGATCAACCCTAACAGTGGTGTCACATACT |
| | | | ATGCACAGAAGTTTCAGGGCAGGGTCACCATGACCAGGGACACG |
| | | | TCCATCAGCACAGCCTACATGGAGCTGAACAGACTTAGATCTGAC |
| | | | GACACGGCCGTGTATTACTGTGCGAGAGATCGGACCTTCTACTTT |
| | | | GACTACTGGGGCCAGGGAACCCTGGTCACTGTCTCCTCA |
| 1122 | ATX-P-3433 | VH nt | CAGGTGCAGCTGGTGCAGTCTGGGGCTGAGGTGAAGAAGCCTGG |
| | | | GGCCTCAGTGAAGGTCTCCTGCAAGGCTTCTGGATACACCTTCAC |
| | | | CGACTACTATATGCACTGGGTGCGACAGGCCCCTGGACAAGGGC |
| | | | TTGAGTGGATGGGATGGATCAACCCTAACAATGGTGGCACAGAC |
| | | | TATGCACAGAAGTTTCAGGGCAGGGTCACCATGACCAGGGACAC |
| | | | GTCCATCAGCACAGCCTACATGGAGTTACACAGGCTAAGATCTGA |
| | | | CGACACGGCCGTGTATTTCTGTGCGAGAGGGGTCTATGATGTAGT |
| | | | AGTTCCAACTGCTATCGTCAACTGGTTCGACCCCTGGGGCCAGGG |
| | | | AACCCTGGTCACCGTCTCCTCA |
| 1123 | ATX-P-3438 | VH nt | CAGGTGCAGCTGCAGGAGTCGGGCCCAGGACTGGTGAAGCCTTC |
| | | | GGGGACCCTGTCCCTCACCTGCGCTGTCTCTGGTGACTCCATCAG |
| | | | CAATGATTACTGGTGGAATTGGGTCCGCCAGCCCCCAGGGAAGG |
| | | | GTCTGGAGTGGATTGGAGAAATCTATCATAGTGGGCACACCAACT |
| | | | ACAACCCGTCCCTCAAGAGTCGAGTCACCATATCAGTAGACAAGT |
| | | | CCAAGAACCAGTTGTCCCTGAAGCTGACCTCTGTGAACGCCGCGG |
| | | | ACACGGCCGTGTATTACTGTGCGAGAGGTGGAACTGAAATTACG |
| | | | GGGTACATGGACGTCTGGGGCAAAGGGACCACGGTCACCGTCTC |
| | | | CTCA |
| 1124 | ATX-P-3441 | VH nt | CAGGTGCAGCTGCAGGAGTCGGGCCCAGGACTGGTGAAGCCTTC |
| | | | GGGGACCCTGTCCCTCACCTGCGCTGTCTCTGGTGCCTCCATCAG |
| | | | AAGTGGTCACTGGTGGAGTTGGGTCCGCCAGCCCCCAGGGAAGG |
| | | | GACTGGAGTGGATTGGGGAAATCTATCATAGTGGGAACACCAAC |
| | | | TACAACCCGTCCCTCAAGAGTCGAGTCACCCTATCAGTAGACAAG |
| | | | TCCAAGAACCAGTTCTCCCTGAAGCTGAGCTCTGTGACCGCCGCG |
| | | | GACACGGCCGTGTATTACTGTGCGAGAGGTCACTACGGTGACTAC |
| | | | GTCGTCTACTTTGACTACTGGGGCCAGGGAACCCTGGTCACTGTC |
| | | | TCCTCA |
| 1125 | ATX-P-3446 | VH nt | CAGGTGCAGCTGCAGGAGTCGGGCCCAGGACTGGTGAAGCCTTC |
| | | | GGAGACCCTGTCCCTCACCTGCACTGTCTCTGGTGGCTCCATCAG |
| | | | TAGTTACTATTGGAGCTGGATCCGGCAGCCCCCAGGGAAGGGAC |
| | | | TGGAATGGATTGGTTATGTCTATTACAGTGGGTACACCAAGTACA |
| | | | ATCCCTCCCTCAAGAGTCGAGTCACCATATCAATAGACGCGTCCA |
| | | | AGAACCAGTTCTCCCTGAAGCTGACCTCTGTGACCGCTGCGGACA |
| | | | CGGCCGTGTATTACTGTGCGACCGTCGAATCAAAGTGGAACTACG |
| | | | GGCCTTTTGCTATCTGGGGACAAGGGACAATGGTCACCGTCTCTT |
| | | | CA |
| 1126 | ATX-P-3452 | VH nt | CAGGTGCAGCTGGTGCAGTCTGGGGCTGAGGTGAAGAAGCCTGG |
| | | | GGCCTCAGTGAAGGTCTCCTGCAAGGCTTCTGGATACACCTTCAC |
| | | | CGGCTACTATATGAACTGGGTGCGACAGGCCCCTGGACAAGGGC |
| | | | TTGAGTGGATGGGATGGATCAACCCTAACAGTGGTGCCACAAAC |
| | | | TATGCACAGAAGTTTCAGGGCAGGGTCACCATGACCAGGGACAC |
| | | | GTCCATCAGCACAGACTACATGGAACTGAGCAGGCTGAGATCTG |
| | | | ACGACACGGCCGTTTATTACTGTGCGAGAGATGGGGCTAAGTGG |
| | | | AATCACGAGGGTTACTACTTTGACTACTGGGGCCAGGGAACCCTG |
| | | | GTCACCGTCTCCTCA |
| 1127 | ATX-P-3360 | VH aa | QVQLQESGPGLVKPSGTLSLTCAVSGGSISINNWWSWVRQPPGKGL |
| | | | EWLGKIYHSGNTDYNPSLKSRVTISVDKSKNQFSLRLSSVTAADTAV |
| | | | YYCASGSDYDFWSGYLDYWGQGTLVTVSS |
| 1128 | ATX-P-3362 | VH aa | EVQLVESGGGLVQPGRSLRLSCAASGFTFDDYAMHWVRQAPGKGL |
| | | | EWVSGISWNSGSIAYADSVKGRFTISRDNAKNSLYLQMNSLRVEDT |
| | | | AFFYCARVAAAAGIPFFDYWGQGTLVTVSS |
| 1129 | ATX-P-3363 | VH aa | QVQLQESGPGLVKPSGTLTLTCAVSGGSINRDNWWSWVRQPPGKGL |
| | | | EWIGQIYQSGSTNYNPSLKSRVTISVDKSKNQFSLKLSSVTAADTAV |
| | | | YYCARVYDWNYGGHFDYWGQGTLVTVSS |
| 1130 | ATX-P-3365 | VH aa | QVQLQESGPGLVKPSGTLSLTCAVSGDSISSNNWWSWVRQPPGKGL |
| | | | EWIGQIYHSGHTNYNPSLKSRVTISVDMSKNQFSLKLTSVTAADTAV |
| | | | YYCARGATEILGYFDLWGRGTLVTVSS |
| 1131 | ATX-P-3367 | VH aa | QVQLQESGPGLVKPSETLSLTCTVSGGSVSSGSYYWSWIRQPPGKGL |
| | | | EWIGYIYKSGFTNYNPSLKSRVTISVDTSKNQFSLKLSSVTAADTAVY |
| | | | YCAIGGRGYSYGPFDYWGQGTLVTVSS |
| 1132 | ATX-P-3369 | VH aa | QVQLVQSGAEVKKPGASVKVSCKASGYTFTGYYLHWVRQAPGQGL |
| | | | EWMGWINPNSGDTNYVQNFQGRVTMTRDTSISTAYMELSRLRSDD |
| | | | TAVYYCARSYVDTSSSAFDIWGQGTMVTVSS |
| 1133 | ATX-P-3370 | VH aa | QVQLQESGPGLVKPSETLSLTCTVSGGSISSYYWSWIRQPPGKGLEWI |
| | | | GYVYYSGYTKYNPSLKSRVTISVDTPKTQFSLKMSSVTAADTAVYY |
| | | | CASVESKWNYGPFDIWGQGTMVTVSS |
| 1134 | ATX-P-3371 | VH aa | QVQLQESGPGLVKPSETLSLTCTVSGDSISSYYWSWIRQPPGKGLEWI |
| | | | GYIYYSGFTKYNPSLNSRVTISVDTSKSQFSLKLTSVTAADTAVYYC |
| | | | AMREPRGRYNWNYGPFDIWGQGTMVTVSS |
| 1135 | ATX-P-3373 | VH aa | QVQLQESGPGLVKPSGTLSLTCAVSGGSISNDNWWSWVRQPPGKGL |
| | | | EWIGKIYHSEFTNYNPSLKSRVTISVDKSKNQFSLELNSVTAADTAV |
| | | | YYCAREYHNFMDVWCKGTTVTVSS |
| 1136 | ATX-P-3375 | VH aa | QVQLQESGPGLVKPSETLSLTCTVSGDSVSSGKYFWSWIRQSPGKGL |
| | | | EWIGYIYYSGSTNYNPSLKNRVTISVDTSKKELSLKLSSVTAADTAV |
| | | | YYCARGGHNWNYAAFDIWGQGTMVTVSS |
| 1137 | ATX-P-3378 | VH aa | QVQLQESGPGLVKPSGTLSLTCAVSGGSISNDNWWSWVRQSPGKGL |
| | | | EWIGKIYHSEFTNYNPSLKSRVTISVDKSKNQFSLELSSVAAADTAVY |
| | | | YCAREYENFMDVWGKGTTVTVSS |
| 1138 | ATX-P-3382 | VH aa | QVQLQESGPGLVKPSGTLSLTCAVSGDSISSNSWWNWVRQPPGKGL |
| | | | EWIGQIFHSGHTNYNPSLKSRVTMSIDKSKNQFSLKLTSVTAADTAL |
| | | | YYCARGGEYENSANWEDPWGQGTLVTVSS |
| 1139 | ATX-P-3383 | VH aa | QVQLQESGPGLVKPSGTLSLTCAVSGVSINKDNWWTWVRQPPGKG |
| | | | LEWIGKIYHSGSTNYNPSLKSRVTISVDNSKNQFSLKLNSVTAADTA |
| | | | VYYCTRGGDIAMEGDWFAPWGQGTLVTVSS |
| 1140 | ATX-P-3384 | VH aa | QVQLQESGPGLVKPSGTLSLTCAVSGGSISSDNWWNWVRQPPGKGL |
| | | | EWLGKIYHSGNTDYNPSLKSRVTISVDKSKNQFSLRLSSVTAADTAV |
| | | | YYCARGGTETTGYMDVWGKGTTVTVSS |
| 1141 | ATX-P-3386 | VH aa | QVQLQESGPGLVKPSGTLSLTCAVSGGSISNDNWWSWVRQPPGKGL |
| | | | EWIGKIYHSGFTNYNPSLKSRVTISVDKSKNQFSLKLNSVTAADTAV |
| | | | YYCARGGDNFMEGEGLGTWGPGTLVTVSS |
| 1142 | ATX-P-3387 | VH aa | QVQLQESGPGLVKPSGTLSLTCAVSGGSISNDNWWNWVRQSPGKGL |
| | | | EWIGKIYHSGFTDYNPSLKSRVTISVDKSKNQFSLKLSSVTAADTAV |
| | | | YYCARGNHNYLWIGYLGTWGPGTLVTVSS |
| 1143 | ATX-P-3389 | VH aa | QVQLQESGPGLVKPSGTLSLICAVSGGSISSSNWWSWVRQPPGKGLE |
| | | | WIGRIYHSGHTNYNPSLKSRVTISVDKSKNQFSLKLTSVTAADTAVY |
| | | | YCARGRDLTGYFDYWGQGTLVTVSS |
| 1144 | ATX-P-3391 | VH aa | QVQLQESGPGLVKPSGTLSLTCAVSGGSISNDNWWSWVRQSPGKGL |
| | | | EWIGKIYHSEFTNYNPSLKSRVTISVDKSKNQFSLELSSVTAADTAVY |
| | | | YCARGVDFWSGSHMDVWGKGTTVTVSS |
| 1145 | ATX-P-3392 | VH aa | QVQLQESGPGLVKPSGTLSLTCAVSGGSISNDNWWSWVRQSPGKGL |
| | | | EWIGKIYHSEFTNYNPSLKSRVTISVDKSKNQFSLELSSVTAADTAVY |
| | | | FCAREGLELPHMDVWGKGTTVTVSS |
| 1146 | ATX-P-3395 | VH aa | EVQLVESGGGVVKPGGSLRLSCAASGFTFSSYWMHWVRQAPGKGL |
| | | | VWVSRINSDGSSTSYADSVQGRFTISRDIAKNTLYLQMNSLRAEDTA |
| | | | VYYCARGQHLVQDYWGQGTLVTVSS |
| 1147 | ATX-P-3396 | VH aa | QVQLVQSGAEVKNPGASVKVSCKASGYTFTGYYMHWVRQAPGQG |
| | | | LEWMGWINPNSGGTNYAQKFQGRVTMTRDTSISTAYMELSRLRSD |
| | | | DTAVYYCARERGDYDGDAFDIWGQGTMVTVSS |
| 1148 | ATX-P-3397 | VH aa | EVQLVESGGGLVQPGGSLRLSCAASGFTFSNYYMNWVRQAPGKGL |
| | | | EWVANIKQDGSEKYYVDSVKGRFTISRDNAKNSLYLQMNSLRAEDT |
| | | | AVYYCARDGYYNFDAFDIWGQGTMVTVSS |
| 1149 | ATX-P-3405 | VH aa | EVQLVESGGGLVQPGGSLRLSCAASGFTFSSYSMNWVRQAPGKGLE |
| | | | WVSSISSSSSYIYYADSVKGRFTISRDNAKNSLYLQMNSLRAEDTAV |
| | | | YYCAREGYDNWNSACDIWGQGTMVTVSS |
| 1150 | ATX-P-3406 | VH aa | QITLKESGPTLVKPTQTLTLTCTFSGFSLSTSGVGVGWIRQPPGKALE |
| | | | WLALIYWNGDERYSPSLKSRLTITKDTSKNQVVLTMINMDPVDTAT |
| | | | YYCAHSPNWGYEAFDIWGQGTMVTVSS |
| 1151 | ATX-P-3407 | VH aa | EVQLVESGGGLVPPGGSLRLSCAASGFTFSSYCMNWVRQAPGKGLE |
| | | | WVSSINSDSSYIYYADSVKGRFTISRDNAKNSLYLQMNSLRAEDTAV |
| | | | YYCAREGYYNWNGGNDYWGQGTLVTVSS |
| 1152 | ATX-P-3408 | VH aa | EVQLVESGGGLVQPGGSLRLSCAASGFTFSSYWMHWVRQAPGKGL |
| | | | VWVSHINSDGSSTNYADSVKGRFTISRDNAKNTLYLQMNSLRSEDT |
| | | | AVYYCAREGYWNGDTFDIWGQGTMVTVSS |
| 1153 | ATX-P-3410 | VH aa | EVQLVESGGGLVQPGGSLRLSCAASGFTFSAYDMHWVRQTPGKGLE |
| | | | WVSTIGTAGDTYYPDSVKGRFTISRDFARRSLYLHMNNLRAGDTAV |
| | | | YYCARGGSSSWYDWYFDLWGRGTLVTVSS |
| 1154 | ATX-P-3412 | VH aa | QVQLQESGPGLVKPSGTLSLTCAVSGGSISSSTWWSWVRQPPGKGLE |
| | | | WIGEIYHSGSTNYNPSLKSRVTISLDKSKNQFSLKLSSVTAADTAVYY |
| | | | CAISLYNWNDAAFDIWGQGTMVTVSS |
| 1155 | ATX-P-3413 | VH aa | QVQLVQSGSEVKKPGASVKVSCKTSGYTFTGYYMHWVRQAPGQGL |
| | | | EWMGWINPNSGGTTYAQKFQGRVTMTRDTSISTAYMELNRLRSDD |
| | | | TAVYYCAREAGGSGEYFQHWGQGTPVTVSS |
| 1156 | ATX-P-3414 | VH aa | QITLKESGPTLVKPTQTLTLTCTFSGFSLSTSGVGVGWIRQPPGKALE |
| | | | WLALIYWNDVKFYSPSLQSRLTITKDTSKNQVVLTLTNMDPVDTAT |
| | | | YYCAHGDNWNYRAFDIWGQGTMVTVSS |
| 1157 | ATX-P-3419 | VH aa | QVQLVQSGAEVKKPGASVKVSCKASGYTFTSYGISWVRQAPGQGLE |
| | | | WMGWISAYNGNTHYAQNLQGRVTMTTDTSTSTAYMELRSLRSDDT |
| | | | AVYYCARSIAALDFWGQGTPVTVSS |
| 1158 | ATX-P-3421 | VH aa | QVQLQESGPGLVKPSGTLSLTCAVSGGSISSNNWWSWVRQPPGKGL |
| | | | EWIGQIYHSENTNYNPSLKSRVTISVDKSKNQFSLKLSSVTAADTAIY |
| | | | YCARVDDWNYGGHFDYWGQGTLVTVSS |
| 1159 | ATX-P-3428 | VH aa | QVQLVQSGAEVKKPGASVKVSCKASGYTFTGYGISWVRQAPGQGL |
| | | | EWMGWISAYNGNTHYAQNLQGRVIMTTDTSTNTAYMELRSLISDD |
| | | | TAFYYCARAGLGIDYWGQGTLVTVSS |
| 1160 | ATX-P-3430 | VH aa | QVQLQESGPGLVKPSGTLSLTCAVSGGSISSSDWWSWVRQSPGKGL |
| | | | EWIGEIYHSGSTNYNPSLKSRVSISVDKSKNQFSLKLSSVTAADTAVY |
| | | | YCARGGHIGYYYMDVWGKGTTVTVSS |
| 1161 | ATX-P-3431 | VH aa | EVQLVQSGAEVKKPGESLKISCKGSGYSFTNYWIGWVRQMPGKGLE |
| | | | WMGIIYPGDSDTIYSPSFQGQVTFSADKSINTAYLQWSSLKASDTAM |
| | | | YYCARGRGYSGYEGAFDIWGQGTMVTVSS |
| 1162 | ATX-P-3435 | VH aa | QVQLVQSGAEVKKPGASVKVSCKASGYTFTNYGISWVRQAPGQGL |
| | | | EWMGWISAYNGNTHYAQKLQGRVTMTTDTSTSTAYMELRSLRSDD |
| | | | TAVYYCARAAAAVDYWGQGTLVTVSS |
| 1163 | ATX-P-3436 | VH aa | QVQLQESGPGLVKPSETLSLSCTVSGGSVSSGSYYWSWIRQPPGKGL |
| | | | EWIGYIYYSGSTKYNPSLKSRVTISVDTSKNQVSLKLSSVTAADTAV |
| | | | YYCARDKGHWNYGAFDIWGQGTMVTVSS |
| 1164 | ATX-P-3437 | VH aa | QVQLQESGPGLVKPSGTLSLTCAVSGGSISSNNWWSWVRQPPGKGL |
| | | | EWIGEIYHSGNINYNPSLKSRVTISVDKSKNQFSLKLSSVTAADTAVY |
| | | | YCARGGEYGDPVGYFDLWGRGTLVTVSS |
| 1165 | ATX-P-3440 | VH aa | QVQLVQSGAEVKKPGASVKVSCKASGYTFTTYGISWVRQAPGQGLE |
| | | | WMGWISAYSGNTNYAQKLQGRVTMTTDTSTSTAYMELRSLRSDDT |
| | | | AVYYCARERVSNWVFDFWGQGTLVTVSS |
| 1166 | ATX-P-3442 | VH aa | QVQLQESGPGLVKPSGTLSLTCAVSGGSISSSDWWSWVRQPPGKGL |
| | | | EWIGEIYHSRNTNYNPSLKSRVTISVDKSKNQFSLKLSSVTAADTAV |
| | | | YYCASGGVVADYYMDVWGKGTTVTVSS |
| 1167 | ATX-P-3444 | VH aa | EVQLVESGGGLVKPGGSLRLSCAASGFTFSSYGMNWVRQAPGKGLE |
| | | | WVSSISGYGSYIYYAASVKGRFTISRDSAKNSLYLQMNSLSAEDTAV |
| | | | YYCARELGGIYYGVGYFDLWGRGTLVTVSS |
| 1168 | ATX-P-3447 | VH aa | QVQLQESGPGLVKPSETLSLTCAVSGGSVSSGNYYWSWIRQPPGKG |
| | | | LEWIGYIYSSGSTNYNPSLKSRVTISIDTSKNQFSLKLSSVTAADTAV |
| | | | YYCARSPRGYSYGPFAYWGQGTLVTVSS |
| 1169 | ATX-P-3448 | VH aa | QVQLQESGPGLVKPSQTLSLTCTVSGGSISSGGYNWNWIRQHPGKGL |
| | | | EWIGYINYSGNTYYNPSLKSRVTISVDTSKNQFSLKLSSVTAADTAV |
| | | | YYCARGPLDTAMAPFDYWGQGTLVTVSS |
| 1170 | ATX-P-3449 | VH aa | QVQLQESGPGLVKPSETLSLTCTVSGDSISSYYWSWIRQPPGKGLEWI |
| | | | GYIYYSGFTKYNPSLKSRVTISVDTSKNQFSLRLSSVTAADTAVYYC |
| | | | ASVDSKWNYGSFHIWGQGTMVTVSS |
| 1171 | ATX-P-3450 | VH aa | QVQLQESGPGLVKPSETLSLTCSVSGDSVSNNRYYWSWIRQPPGKGL |
| | | | EWIGYIYYSGSTNYNPSLKSRVTISVDTSKNQLSLNLSSVTAADTAV |
| | | | YYCARDRPSRYKWNYDAFAIWGQGTMVTVSS |
| 117 | ATX-P-3451 | VH aa | QVQLQQWGAGLLKPSETLSLTCAVYGGSFSDYYWTWIRQPPGKGLE |
| | | | WIGEVNHIGSTNYNPSLKSRVTISVDTSKNQFSLNLSSVTAADTAVY |
| | | | YCAKYSTSWYGWFDPWGQGTLVTVSS |
| 1173 | ATX-P-3453 | VH aa | QVQLQESGPGLVKPSGTLSLTCAVSGDSISSNNWWSWFRQPPGKGL |
| | | | EWIGRIYHSGTTNYNPSLESRVTISVDNSRNQFSLKLSSVTAADTAVY |
| | | | YCARGEEWELRGGVFDIWGQGTMVTVSS |
| 1174 | ATX-P-3454 | VH aa | QVQLVQSGPELKKPGASVKVSCKASGYTFTNYAVNWVRQAPGQGL |
| | | | EWMGWINTNTGHPTYAQGFTGRFVFSLDTSVSTAYLQISSLKAEDT |
| | | | AVYYCARDSSSWGYWGQGTLVTVSS |
| 1175 | ATX-P-3455 | VH aa | QVQLQESGPGLVTPSGTLSLTCAVSGDSISSDNWWSWVRQPPGKGL |
| | | | EWIGEIYHSENTNYNPSLKSRVTISVDKSKNQFSLRLNSVTAADTAM |
| | | | YYCARGRELTGLFDYWGQGTLVTVSS |
| 1176 | ATX-P-3456 | VH aa | QVQLQESGPGLVKPSGTLSLTCAVSGGSISSNNWWSWVRQPPGKGL |
| | | | EWIGDIYHSGNTNYNPSLKSRVTLSVDMSKNQFSLKLNSVTAADTA |
| | | | VYYCARGGIAVTAYFDYWGQGTLVTVSS |
| 1177 | ATX-P-3458 | VH aa | QVQLVQSGAEVKKPGASVKVSCKASGYTFTGYYLHWVRQAPGQGL |
| | | | EWMGWINPHSGGTIYAQKFQDRVTMTRDTSISTAYMELSRLRSDDT |
| | | | AVYYCANWNSGDSYYYYMDVWGKGTTVTVSS |
| 1178 | ATX-P-3459 | VH aa | QVQLQESGPGLVKPSGTLSLTCAVSGGSISSDNWWNWVRQPPGKGL |
| | | | EWIGKIYHSGNTNYNPSLKSRVTISVDESKNQFSLRLYSVTAADTAV |
| | | | YYCARGVDFWSGSHMDVWGKGTTVTVSS |
| 1179 | ATX-P-3462 | VH aa | QVQLQESGPGLVKPSGTLSLTCAVSGGSISSNNWWSWVRQAPGKGL |
| | | | EWIGKIYQSGSTMYNPSLKSRVTMSVDKSKNQFSLILSSVTAADTAV |
| | | | YYCARDKPPLLGAFDYWGQGTLVTVSS |
| 1180 | ATX-P-3463 | VH aa | QVQLVESGGGVVQPGRSLRLSCAASGFTFSSYAMHWVRQAPGKGL |
| | | | EWVAVISYDGSNKYYADSVKGRFTISRDNSKNTLSLQMNSLRAEDT |
| | | | AVYYCAKRGGYSYGPFEHWGQGTLVTVSS |
| 1181 | ATX-P-3466 | VH aa | QVQLVQSGSELKKPGASVKVSCKASGYTFTSYTMNWVRQAPGQGL |
| | | | EWVGWINTATGTPTYAQGFTGRYVFSLDTSVSTAYLQISGLKAEDT |
| | | | AVYFCARYSGSHSFDYWGQGTLVTVSS |
| 1182 | ATX-P-3467 | VH aa | QVQLQESGPGLVKPSGTLSLTCAVSGGSISSDYWWSWVRQSPGKGL |
| | | | EWIGKIYHSGNINHNPSLKSRVTISIDKSRNQFSLNLNSVTAADTAVY |
| | | | YCAREGLELPHMDVWGKGTTVTVSS |
| 1183 | ATX-P-3468 | VH aa | QVQLVESGGGLVQPGRSLRLSCAASGFTFSSYAMHWVRQAPGKGLE |
| | | | WVTVISYDGSNKYYADSVKGRFTISRDNSKNTLYLQMNSLRAEDTA |
| | | | VYYCAKRGNWNYGPFHYWGQGTLVTVSS |
| 1184 | ATX-P-3469 | VH aa | QVQLVESGGGVVQPGRSLRLSCAASGFTFSAY AIHWVRQAPGKGLE |
| | | | WVAVISYDGSNKKYADSVKGRFTISRDNSKNTLDLEMNSLRAEDTA |
| | | | VYYCAKGLPFDYWGQGTLVTVSS |
| 1185 | ATX-P-3470 | VH aa | QVQLVQSGSDLKKPGASVKVSCKASGYTFTSYTMNWVRQAPGQGL |
| | | | EWMGWINTNTGTPTYAQGFTGRFVFSLDTSVSTAYLQISSLKAEDTA |
| | | | VYYCTRYTGNYSFDYWGQGTLVTVSS |
| 1186 | ATX-P-3471 | VH aa | EVQLVESGGVLVQPGGSLRLSCAASGFTFRSYAMSWVRQAPGKGLE |
| | | | WVSAISGSGDSTYFADSVKGRFTISRDNSKNTLSLQMNSLRAEDTAV |
| | | | YYCASILGYCSGTSCYGLFDNWGQGTLVTVSS |
| 1187 | ATX-P-3472 | VH aa | QVQLQESGPGLVKPSGTLSLTCAVSGGSISNDNWWSWVRQSPGKGL |
| | | | EWIGKIYHSEFTNYNPSLRSRVTISVDKSKNQFSLELTSVTAADTAVY |
| | | | YCAREYQNYMDVWGKGTTVTVSS |
| 1188 | ATX-P-3461 | VH aa | QVQLQESGPGLVKPSGTLSLTCVVSGDSISSNNWWSWVRQPPGKGL |
| | | | EWIGQIYHSGITNYNPSLKSRVTISVDKSKNQFSLELTSVTAADAAVY |
| | | | YCARAQWELRAGWEDPWGQGTLVTVSS |
| 1189 | ATX-P-3466 | VH aa | EVQLVESGGGLVKPGGTLTLSCAASGFTFSNAWMSWVRQAPGKGL |
| | | | EWVGRIKSKTDGGTTDYAAPVKGRFTISRDDSKNTLYLQMNSLKTE |
| | | | DTAVYYCTPRYNSDFDYWGQGTLVTVSS |
| 1190 | ATX-P-3476 | VH aa | QVQLQESGPGLVKPSETLSLTCTVSGGSISSYYWSWIRQPPGKGLEWI |
| | | | GYIYYSGFTKYNPSLKSRVTISVDTSKNQFSLKLSSVTAADTAVYYC |
| | | | ATHPRGYNYGPFDYWGQGTLVTVSS |
| 1191 | ATX-P-3477 | VH aa | QVQLQESGPGLVKPSETLSLTCTVSGGSVNSGRYYWSWIRQPPGKG |
| | | | LEWIGYIYSSGYTNYNPSLKSRVTMLLDTSKNQFSLKLNSVTAADTA |
| | | | VYYCARSRGYRYGPFDYWGQGTLVTVSS |
| 1192 | ATX-P-3418 | VH aa | QVQLVQSGSELKKPGASVKVSCEASGYTFTSYAMNWVRQAPGQGL |
| | | | EWMGWINTNTGTPTYAQGFTGRFVFSLDTSVSTAYLQISSLKAEDTA |
| | | | VYYCASHSTSFDYWGQGTLVTVSS |
| 1193 | ATX-P-3420 | VH aa | QVQLQQWGAGLVKPSETLSLTCAVHGGSFSDYYLTWIRQPPGKGLE |
| | | | WIGEINHSGSTNYNPSLKSRVTLSIDTSKNQFSLKLSSVTAADTAVYY |
| | | | CARGSEDYYYYMDVWGKGTTVTVSS |
| 1194 | ATX-P-3426 | VH aa | EVQLVQSGAEVKKPGESLKISCKGSGYIFTSYWIGWVRQMPGKGLE |
| | | | WMGIIYPGDSDTRYSPSFQGQVTISADKSIITAYLQWSSLKASDTAM |
| | | | YYCARHDYFDIGGYFDYWGQGTLVTVSS |
| 1195 | ATX-P-3432 | VH aa | QVQLVQSGAEVKKPGASVKVSCKADGYTFTDYYMHWVRQAPGQG |
| | | | HEWMGWINPNSGVTYYAQKFQGRVTMTRDTSISTAYMELNRLRSD |
| | | | DTAVYYCARDRTFYFDYWGQGTLVTVSS |
| 1196 | ATX-P-3433 | VH aa | QVQLVQSGAEVKKPGASVKVSCKASGYTFTDYYMHWVRQAPGQG |
| | | | LEWMGWINPNNGGTDYAQKFQGRVTMTRDTSISTAYMELHRLRSD |
| | | | DTAVYFCARGVYDVVVPTAIVNWEDPWGQGTLVTVSS |
| 1197 | ATX-P-3438 | VH aa | QVQLQESGPGLVKPSGTLSLTCAVSGDSISNDYWWNWVRQPPGKGL |
| | | | EWIGEIYHSGHTNYNPSLKSRVTISVDKSKNQLSLKLTSVNAADTAV |
| | | | YYCARGGTEITGYMDVWGKGTTVTVSS |
| 1198 | ATX-P-3441 | VH aa | QVQLQESGPGLVKPSGTLSLTCAVSGASIRSGHWWSWVRQPPGKGL |
| | | | EWIGEIYHSGNTNYNPSLKSRVTLSVDKSKNQFSLKLSSVTAADTAV |
| | | | YYCARGHYGDYVVYFDYWGQGTLVTVSS |
| 1199 | ATX-P-3446 | VH aa | QVQLQESGPGLVKPSETLSLTCTVSGGSISSYYWSWIRQPPGKGLEWI |
| | | | GYVYYSGYTKYNPSLKSRVTISIDASKNQFSLKLTSVTAADTAVYYC |
| | | | ATVESKWNYGPFAIWGQGTMVTVSS |
| 1200 | ATX-P-3452 | VH aa | QVQLVQSGAEVKKPGASVKVSCKASGYTFTGYYMNWVRQAPGQG |
| | | | LEWMGWINPNSGATNYAQKFQGRVTMTRDTSISTDYMELSRLRSD |
| | | | DTAVYYCARDGAKWNHEGYYFDYWGQGTLVTVSS |

TABLE 8
Anti-C3 antibodies (VL sequences)

| SEQ ID | Antibody | | |
|---|---|---|---|
| NO: | Name: | Descriptor: | Sequence: |
| 1201 | ATX-P-3360 | VL nt | GACATCGTGATGACCCAGTCTCCAGACTCCCTGGCTGTGTCTCTG |
| | | | GGCGAGAGGGCCACCATCAACTGCAAGTCCAGCCAGAGTGTTTT |
| | | | ATACAGCTCCAACAATAAGAACTACTTAGCTTGGTACCAGCAGA |
| | | | AACCAGGACAGCCTCCTAAGCTGCTCATTTACTGGGCATCTAACC |
| | | | GGGAATCCGGGGTCCCTGACCGATTCAGTGGCTCCGGGTCTGGGA |
| | | | CAGATTTCACTCTCACCATCAGCAGCCTGCAGGCTGAAGATGTGG |
| | | | CAGTTTATTACTGTCAGCAATATTATAGTACTCCGTACACTTTTGG |
| | | | CCAGGGGACCAAGCTGGAGATCAAA |
| 1202 | ATX-P-3362 | VL nt | GACATCGTGATGACCCAGTCTCCAGACTCCCTGGCTGTGTCTCTG |
| | | | GGCGAGAGGGCCACCATCAACTGCAAGTCCAGCCAGAGTGTTTT |
| | | | ATACAGCTCCAACAATAAGAACTACTTAGCTTGGTACCAGCAGA |
| | | | AACCAGGACAGCCTCCTAAGCTGCTCATTTACTGGGCATCTAACC |
| | | | GGGAATCCGGGGTCCCTGACCGATTCAGTGGCTCCGGGTCTGGGA |
| | | | CAGATTTCACTCTCACCATCAGCAGCCTGCAGGCTGAAGATGTGG |
| | | | CAGTTTATTACTGTCAGCAATATTATAGTACTCCGTACACTTTTGG |
| | | | CCAGGGGACCAAGCTGGAGATCAAA |
| 1203 | ATX-P-3363 | VL nt | GACATCGTGATGACCCAGTCTCCAGACTCCCTGGCTGTGTCTCTG |
| | | | GGCGAGAGGGCCACCATCAACTGCAAGTCCAGCCAGAGTGTTTT |
| | | | ATACAGCTCCAACAATAAGAACTACTTAGCTTGGTACCAGCAGA |
| | | | AACCAGGACAGCCTCCTAAGCTGCTCATTTACTGGGCATCTAACC |
| | | | GGGAATCCGGGGTCCCTGACCGATTCAGTGGCTCCGGGTCTGGGA |
| | | | CAGATTTCACTCTCACCATCAGCAGCCTGCAGGCTGAAGATGTGG |
| | | | CAGTTTATTACTGTCAGCAATATTATAGTACTCCGTACACTTTTGG |
| | | | CCAGGGGACCAAGCTGGAGATCAAA |
| 1204 | ATX-P-3365 | VL nt | GACATCGTGATGACCCAGTCTCCAGACTCCCTGGCTGTGTCTCTG |
| | | | GGCGAGAGGGCCACCATCAACTGCAAGTCCAGCCAGAGTGTTTT |
| | | | ATACAGCTCCAACAATAAGAACTACTTAGCTTGGTACCAGCAGA |
| | | | AACCAGGACAGCCTCCTAAGCTGCTCATTTACTGGGCATCTAACC |
| | | | GGGAATCCGGGGTCCCTGACCGATTCAGTGGCTCCGGGTCTGGGA |
| | | | CAGATTTCACTCTCACCATCAGCAGCCTGCAGGCTGAAGATGTGG |
| | | | CAGTTTATTACTGTCAGCAATATTATAGTACTCCGTACACTTTTGG |
| | | | CCAGGGGACCAAGCTGGAGATCAAA |
| 1205 | ATX-P-3367 | VL nt | GACATCGTGATGACCCAGTCTCCAGACTCCCTGGCTGTGTCTCTG |
| | | | GGCGAGAGGGCCACCATCAACTGCAAGTCCAGCCAGAGTGTTTT |
| | | | ATACAGCTCCAACAATAAGAACTACTTAGCTTGGTACCAGCAGA |
| | | | AACCAGGACAGCCTCCTAAGCTGCTCATTTACTGGGCATCTAACC |
| | | | GGGAATCCGGGGTCCCTGACCGATTCAGTGGCTCCGGGTCTGGGA |
| | | | CAGATTTCACTCTCACCATCAGCAGCCTGCAGGCTGAAGATGTGG |
| | | | CAGTTTATTACTGTCAGCAATATTATAGTACTCCGTACACTTTTGG |
| | | | CCAGGGGACCAAGCTGGAGATCAAA |
| 1206 | ATX-P-3369 | VL nt | GACATCGTGATGACCCAGTCTCCAGACTCCCTGGCTGTGTCTCTG |
| | | | GGCGAGAGGGCCACCATCAACTGCAAGTCCAGCCAGAGTGTTTT |
| | | | ATACAGCTCCAACAATAAGAACTACTTAGCTTGGTACCAGCAGA |
| | | | AACCAGGACAGCCTCCTAAGCTGCTCATTTACTGGGCATCTAACC |
| | | | GGGAATCCGGGGTCCCTGACCGATTCAGTGGCTCCGGGTCTGGGA |
| | | | CAGATTTCACTCTCACCATCAGCAGCCTGCAGGCTGAAGATGTGG |
| | | | CAGTTTATTACTGTCAGCAATATTATAGTACTCCGTACACTTTTGG |
| | | | CCAGGGGACCAAGCTGGAGATCAAA |
| 1207 | ATX-P-3370 | VL nt | GACATCGTGATGACCCAGTCTCCAGACTCCCTGGCTGTGTCTCTG |
| | | | GGCGAGAGGGCCACCATCAACTGCAAGTCCAGCCAGAGTGTTTT |
| | | | ATACAGCTCCAACAATAAGAACTACTTAGCTTGGTACCAGCAGA |
| | | | AACCAGGACAGCCTCCTAAGCTGCTCATTTACTGGGCATCTAACC |
| | | | GGGAATCCGGGGTCCCTGACCGATTCAGTGGCTCCGGGTCTGGGA |
| | | | CAGATTTCACTCTCACCATCAGCAGCCTGCAGGCTGAAGATGTGG |
| | | | CAGTTTATTACTGTCAGCAATATTATAGTACTCCGTACACTTTTGG |
| | | | CCAGGGGACCAAGCTGGAGATCAAA |
| 1208 | ATX-P-3371 | VL nt | GACATCGTGATGACCCAGTCTCCAGACTCCCTGGCTGTGTCTCTG |
| | | | GGCGAGAGGGCCACCATCAACTGCAAGTCCAGCCAGAGTGTTTT |
| | | | ATACAGCTCCAACAATAAGAACTACTTAGCTTGGTACCAGCAGA |
| | | | AACCAGGACAGCCTCCTAAGCTGCTCATTTACTGGGCATCTAACC |
| | | | GGGAATCCGGGGTCCCTGACCGATTCAGTGGCTCCGGGTCTGGGA |
| | | | CAGATTTCACTCTCACCATCAGCAGCCTGCAGGCTGAAGATGTGG |
| | | | CAGTTTATTACTGTCAGCAATATTATAGTACTCCGTACACTTTTGG |
| | | | CCAGGGGACCAAGCTGGAGATCAAA |
| 1209 | ATX-P-3373 | VL nt | GACATCGTGATGACCCAGTCTCCAGACTCCCTGGCTGTGTCTCTG |
| | | | GGCGAGAGGGCCACCATCAACTGCAAGTCCAGCCAGAGTGTTTT |
| | | | ATACAGCTCCAACAATAAGAACTACTTAGCTTGGTACCAGCAGA |
| | | | AACCAGGACAGCCTCCTAAGCTGCTCATTTACTGGGCATCTAACC |
| | | | GGGAATCCGGGGTCCCTGACCGATTCAGTGGCTCCGGGTCTGGGA |
| | | | CAGATTTCACTCTCACCATCAGCAGCCTGCAGGCTGAAGATGTGG |
| | | | CAGTTTATTACTGTCAGCAATATTATAGTACTCCGTACACTTTTGG |
| | | | CCAGGGGACCAAGCTGGAGATCAAA |
| 1210 | ATX-P-3375 | VL nt | GACATCGTGATGACCCAGTCTCCAGACTCCCTGGCTGTGTCTCTG |
| | | | GGCGAGAGGGCCACCATCAACTGCAAGTCCAGCCAGAGTGTTTT |
| | | | ATACAGCTCCAACAATAAGAACTACTTAGCTTGGTACCAGCAGA |
| | | | AACCAGGACAGCCTCCTAAGCTGCTCATTTACTGGGCATCTAACC |
| | | | GGGAATCCGGGGTCCCTGACCGATTCAGTGGCTCCGGGTCTGGGA |
| | | | CAGATTTCACTCTCACCATCAGCAGCCTGCAGGCTGAAGATGTGG |
| | | | CAGTTTATTACTGTCAGCAATATTATAGTACTCCGTACACTTTTGG |
| | | | CCAGGGGACCAAGCTGGAGATCAAA |
| 1211 | ATX-P-3378 | VL nt | GACATCGTGATGACCCAGTCTCCAGACTCCCTGGCTGTGTCTCTG |
| | | | GGCGAGAGGGCCACCATCAACTGCAAGTCCAGCCAGAGTGTTTT |
| | | | ATACAGCTCCAACAATAAGAACTACTTAGCTTGGTACCAGCAGA |
| | | | AACCAGGACAGCCTCCTAAGCTGCTCATTTACTGGGCATCTAACC |
| | | | GGGAATCCGGGGTCCCTGACCGATTCAGTGGCTCCGGGTCTGGGA |
| | | | CAGATTTCACTCTCACCATCAGCAGCCTGCAGGCTGAAGATGTGG |
| | | | CAGTTTATTACTGTCAGCAATATTATAGTACTCCGTACACTTTTGG |
| | | | CCAGGGGACCAAGCTGGAGATCAAA |
| 1212 | ATX-P-3382 | VL nt | GACATCGTGATGACCCAGTCTCCAGACTCCCTGGCTGTGTCTCTG |
| | | | GGCGAGAGGGCCACCATCAACTGCAAGTCCAGCCAGAGTGTTTT |
| | | | ATACAGCTCCAACAATAAGAACTACTTAGCTTGGTACCAGCAGA |
| | | | AACCAGGACAGCCTCCTAAGCTGCTCATTTACTGGGCATCTAACC |
| | | | GGGAATCCGGGGTCCCTGACCGATTCAGTGGCTCCGGGTCTGGGA |
| | | | CAGATTTCACTCTCACCATCAGCAGCCTGCAGGCTGAAGATGTGG |
| | | | CAGTTTATTACTGTCAGCAATATTATAGTACTCCGTACACTTTTGG |
| | | | CCAGGGGACCAAGCTGGAGATCAAA |
| 1213 | ATX-P-3383 | VL nt | GACATCGTGATGACCCAGTCTCCAGACTCCCTGGCTGTGTCTCTG |
| | | | GGCGAGAGGGCCACCATCAACTGCAAGTCCAGCCAGAGTGTTTT |
| | | | ATACAGCTCCAACAATAAGAACTACTTAGCTTGGTACCAGCAGA |
| | | | AACCAGGACAGCCTCCTAAGCTGCTCATTTACTGGGCATCTAACC |
| | | | GGGAATCCGGGGTCCCTGACCGATTCAGTGGCTCCGGGTCTGGGA |
| | | | CAGATTTCACTCTCACCATCAGCAGCCTGCAGGCTGAAGATGTGG |
| | | | CAGTTTATTACTGTCAGCAATATTATAGTACTCCGTACACTTTTGG |
| | | | CCAGGGGACCAAGCTGGAGATCAAA |
| 1214 | ATX-P-3384 | VL nt | GACATCGTGATGACCCAGTCTCCAGACTCCCTGGCTGTGTCTCTG |
| | | | GGCGAGAGGGCCACCATCAACTGCAAGTCCAGCCAGAGTGTTTT |
| | | | ATACAGCTCCAACAATAAGAACTACTTAGCTTGGTACCAGCAGA |
| | | | AACCAGGACAGCCTCCTAAGCTGCTCATTTACTGGGCATCTAACC |
| | | | GGGAATCCGGGGTCCCTGACCGATTCAGTGGCTCCGGGTCTGGGA |
| | | | CAGATTTCACTCTCACCATCAGCAGCCTGCAGGCTGAAGATGTGG |
| | | | CAGTTTATTACTGTCAGCAATATTATAGTACTCCGTACACTTTTGG |
| | | | CCAGGGGACCAAGCTGGAGATCAAA |
| 1215 | ATX-P-3386 | VL nt | GACATCGTGATGACCCAGTCTCCAGACTCCCTGGCTGTGTCTCTG |
| | | | GGCGAGAGGGCCACCATCAACTGCAAGTCCAGCCAGAGTGTTTT |
| | | | ATACAGCTCCAACAATAAGAACTACTTAGCTTGGTACCAGCAGA |
| | | | AACCAGGACAGCCTCCTAAGCTGCTCATTTACTGGGCATCTAACC |
| | | | GGGAATCCGGGGTCCCTGACCGATTCAGTGGCTCCGGGTCTGGGA |
| | | | CAGATTTCACTCTCACCATCAGCAGCCTGCAGGCTGAAGATGTGG |
| | | | CAGTTTATTACTGTCAGCAATATTATAGTACTCCGTACACTTTTGG |
| | | | CCAGGGGACCAAGCTGGAGATCAAA |
| 1216 | ATX-P-3387 | VL nt | GACATCGTGATGACCCAGTCTCCAGACTCCCTGGCTGTGTCTCTG |
| | | | GGCGAGAGGGCCACCATCAACTGCAAGTCCAGCCAGAGTGTTTT |
| | | | ATACAGCTCCAACAATAAGAACTACTTAGCTTGGTACCAGCAGA |
| | | | AACCAGGACAGCCTCCTAAGCTGCTCATTTACTGGGCATCTAACC |
| | | | GGGAATCCGGGGTCCCTGACCGATTCAGTGGCTCCGGGTCTGGGA |
| | | | CAGATTTCACTCTCACCATCAGCAGCCTGCAGGCTGAAGATGTGG |
| | | | CAGTTTATTACTGTCAGCAATATTATAGTACTCCGTACACTTTTGG |
| | | | CCAGGGGACCAAGCTGGAGATCAAA |
| 1217 | ATX-P-3389 | VL nt | GACATCGTGATGACCCAGTCTCCAGACTCCCTGGCTGTGTCTCTG |
| | | | GGCGAGAGGGCCACCATCAACTGCAAGTCCAGCCAGAGTGTTTT |
| | | | ATACAGCTCCAACAATAAGAACTACTTAGCTTGGTACCAGCAGA |
| | | | AACCAGGACAGCCTCCTAAGCTGCTCATTTACTGGGCATCTAACC |
| | | | GGGAATCCGGGGTCCCTGACCGATTCAGTGGCTCCGGGTCTGGGA |
| | | | CAGATTTCACTCTCACCATCAGCAGCCTGCAGGCTGAAGATGTGG |
| | | | CAGTTTATTACTGTCAGCAATATTATAGTACTCCGTACACTTTTGG |
| | | | CCAGGGGACCAAGCTGGAGATCAAA |
| 1218 | ATX-P-3391 | VL nt | GACATCGTGATGACCCAGTCTCCAGACTCCCTGGCTGTGTCTCTG |
| | | | GGCGAGAGGGCCACCATCAACTGCAAGTCCAGCCAGAGTGTTTT |
| | | | ATACAGCTCCAACAATAAGAACTACTTAGCTTGGTACCAGCAGA |
| | | | AACCAGGACAGCCTCCTAAGCTGCTCATTTACTGGGCATCTAACC |
| | | | GGGAATCCGGGGTCCCTGACCGATTCAGTGGCTCCGGGTCTGGGA |
| | | | CAGATTTCACTCTCACCATCAGCAGCCTGCAGGCTGAAGATGTGG |
| | | | CAGTTTATTACTGTCAGCAATATTATAGTACTCCGTACACTTTTGG |
| | | | CCAGGGGACCAAGCTGGAGATCAAA |
| 1219 | ATX-P-3392 | VL nt | GACATCGTGATGACCCAGTCTCCAGACTCCCTGGCTGTGTCTCTG |
| | | | GGCGAGAGGGCCACCATCAACTGCAAGTCCAGCCAGAGTGTTTT |
| | | | ATACAGCTCCAACAATAAGAACTACTTAGCTTGGTACCAGCAGA |
| | | | AACCAGGACAGCCTCCTAAGCTGCTCATTTACTGGGCATCTAACC |
| | | | GGGAATCCGGGGTCCCTGACCGATTCAGTGGCTCCGGGTCTGGGA |
| | | | CAGATTTCACTCTCACCATCAGCAGCCTGCAGGCTGAAGATGTGG |
| | | | CAGTTTATTACTGTCAGCAATATTATAGTACTCCGTACACTTTTGG |
| | | | CCAGGGGACCAAGCTGGAGATCAAA |
| 1220 | ATX-P-3395 | VL nt | GACATCCAGATGACCCAGTCTCCTTCCACCCTGTCTGCATCTGTA |
| | | | GGAGACAGCGTCACCATCACTTGCCGGGCCAGTCAGAATATTATT |
| | | | ACCTGGTTGGCTTGGTATCAGCAGAAACCAGGGAAAGCCCCTAA |
| | | | CCTCCTGATCTATAAGGCGTCTAGTTTAGAAAGTGGGGTCCCATC |
| | | | AAGGTTCAGCGGCAGTGGATCTGGGACAGAATTCACTCTCACCAT |
| | | | CAGCAGCCTGCAGCCTGATGATTTTGCAACTTATTACTGCCAACA |
| | | | GTATAGTAGTTATTCGTACACTTTTGGCCAGGGGACCAAGCTGGA |
| | | | GATCAAA |
| 1221 | ATX-P-3396 | VL nt | GACATCCAGATGACCCAGTCTCCTTCCACCCTGTCTGCATCTGTA |
| | | | GGAGACAGCGTCACCATCACTTGCCGGGCCAGTCAGAATATTATT |
| | | | ACCTGGTTGGCTTGGTATCAGCAGAAACCAGGGAAAGCCCCTAA |
| | | | CCTCCTGATCTATAAGGCGTCTAGTTTAGAAAGTGGGGTCCCATC |
| | | | AAGGTTCAGCGGCAGTGGATCTGGGACAGAATTCACTCTCACCAT |
| | | | CAGCAGCCTGCAGCCTGATGATTTTGCAACTTATTACTGCCAACA |
| | | | GTATAGTAGTTATTCGTACACTTTTGGCCAGGGGACCAAGCTGGA |
| | | | GATCAAA |
| 1222 | ATX-P-3397 | VL nt | GACATCCAGATGACCCAGTCTCCTTCCACCCTGTCTGCATCTGTA |
| | | | GGAGACAGCGTCACCATCACTTGCCGGGCCAGTCAGAATATTATT |
| | | | ACCTGGTTGGCTTGGTATCAGCAGAAACCAGGGAAAGCCCCTAA |
| | | | CCTCCTGATCTATAAGGCGTCTAGTTTAGAAAGTGGGGTCCCATC |
| | | | AAGGTTCAGCGGCAGTGGATCTGGGACAGAATTCACTCTCACCAT |
| | | | CAGCAGCCTGCAGCCTGATGATTTTGCAACTTATTACTGCCAACA |
| | | | GTATAGTAGTTATTCGTACACTTTTGGCCAGGGGACCAAGCTGGA |
| | | | GATCAAA |
| 1223 | ATX-P-3305 | VL nt | GACATCCAGATGACCCAGTCTCCTTCCACCCTGTCTGCATCTGTA |
| | | | GGAGACAGCGTCACCATCACTTGCCGGGCCAGTCAGAATATTATT |
| | | | ACCTGGTTGGCTTGGTATCAGCAGAAACCAGGGAAAGCCCCTAA |
| | | | CCTCCTGATCTATAAGGCGTCTAGTTTAGAAAGTGGGGTCCCATC |
| | | | AAGGTTCAGCGGCAGTGGATCTGGGACAGAATTCACTCTCACCAT |
| | | | CAGCAGCCTGCAGCCTGATGATTTTGCAACTTATTACTGCCAACA |
| | | | GTATAGTAGTTATTCGTACACTTTTGGCCAGGGGACCAAGCTGGA |
| | | | GATCAAA |
| 1224 | ATX-P-3306 | VL nt | GACATCCAGATGACCCAGTCTCCTTCCACCCTGTCTGCATCTGTA |
| | | | GGAGACAGCGTCACCATCACTTGCCGGGCCAGTCAGAATATTATT |
| | | | ACCTGGTTGGCTTGGTATCAGCAGAAACCAGGGAAAGCCCCTAA |
| | | | CCTCCTGATCTATAAGGCGTCTAGTTTAGAAAGTGGGGTCCCATC |
| | | | AAGGTTCAGCGGCAGTGGATCTGGGACAGAATTCACTCTCACCAT |
| | | | CAGCAGCCTGCAGCCTGATGATTTTGCAACTTATTACTGCCAACA |
| | | | GTATAGTAGTTATTCGTACACTTTTGGCCAGGGGACCAAGCTGGA |
| | | | GATCAAA |
| 1225 | ATX-P-3307 | VL nt | GACATCCAGATGACCCAGTCTCCTTCCACCCTGTCTGCATCTGTA |
| | | | GGAGACAGCGTCACCATCACTTGCCGGGCCAGTCAGAATATTATT |
| | | | ACCTGGTTGGCTTGGTATCAGCAGAAACCAGGGAAAGCCCCTAA |
| | | | CCTCCTGATCTATAAGGCGTCTAGTTTAGAAAGTGGGGTCCCATC |
| | | | AAGGTTCAGCGGCAGTGGATCTGGGACAGAATTCACTCTCACCAT |
| | | | CAGCAGCCTGCAGCCTGATGATTTTGCAACTTATTACTGCCAACA |
| | | | GTATAGTAGTTATTCGTACACTTTTGGCCAGGGGACCAAGCTGGA |
| | | | GATCAAA |
| 1226 | ATX-P-3308 | VL nt | GACATCCAGATGACCCAGTCTCCTTCCACCCTGTCTGCATCTGTA |
| | | | GGAGACAGCGTCACCATCACTTGCCGGGCCAGTCAGAATATTATT |
| | | | ACCTGGTTGGCTTGGTATCAGCAGAAACCAGGGAAAGCCCCTAA |
| | | | CCTCCTGATCTATAAGGCGTCTAGTTTAGAAAGTGGGGTCCCATC |
| | | | AAGGTTCAGCGGCAGTGGATCTGGGACAGAATTCACTCTCACCAT |
| | | | CAGCAGCCTGCAGCCTGATGATTTTGCAACTTATTACTGCCAACA |
| | | | GTATAGTAGTTATTCGTACACTTTTGGCCAGGGGACCAAGCTGGA |
| | | | GATCAAA |
| 1227 | ATX-P-3310 | VL nt | GACATCCAGATGACCCAGTCTCCTTCCACCCTGTCTGCATCTGTA |
| | | | GGAGACAGCGTCACCATCACTTGCCGGGCCAGTCAGAATATTATT |
| | | | ACCTGGTTGGCTTGGTATCAGCAGAAACCAGGGAAAGCCCCTAA |
| | | | CCTCCTGATCTATAAGGCGTCTAGTTTAGAAAGTGGGGTCCCATC |
| | | | AAGGTTCAGCGGCAGTGGATCTGGGACAGAATTCACTCTCACCAT |
| | | | CAGCAGCCTGCAGCCTGATGATTTTGCAACTTATTACTGCCAACA |
| | | | GTATAGTAGTTATTCGTACACTTTTGGCCAGGGGACCAAGCTGGA |
| | | | GATCAAA |
| 1228 | ATX-P-3312 | VL nt | GACATCCAGATGACCCAGTCTCCTTCCACCCTGTCTGCATCTGTA |
| | | | GGAGACAGCGTCACCATCACTTGCCGGGCCAGTCAGAATATTATT |
| | | | ACCTGGTTGGCTTGGTATCAGCAGAAACCAGGGAAAGCCCCTAA |
| | | | CCTCCTGATCTATAAGGCGTCTAGTTTAGAAAGTGGGGTCCCATC |
| | | | AAGGTTCAGCGGCAGTGGATCTGGGACAGAATTCACTCTCACCAT |
| | | | CAGCAGCCTGCAGCCTGATGATTTTGCAACTTATTACTGCCAACA |
| | | | GTATAGTAGTTATTCGTACACTTTTGGCCAGGGGACCAAGCTGGA |
| | | | GATCAAA |
| 1229 | ATX-P-3313 | VL nt | GACATCCAGATGACCCAGTCTCCTTCCACCCTGTCTGCATCTGTA |
| | | | GGAGACAGCGTCACCATCACTTGCCGGGCCAGTCAGAATATTATT |
| | | | ACCTGGTTGGCTTGGTATCAGCAGAAACCAGGGAAAGCCCCTAA |
| | | | CCTCCTGATCTATAAGGCGTCTAGTTTAGAAAGTGGGGTCCCATC |
| | | | AAGGTTCAGCGGCAGTGGATCTGGGACAGAATTCACTCTCACCAT |
| | | | CAGCAGCCTGCAGCCTGATGATTTTGCAACTTATTACTGCCAACA |
| | | | GTATAGTAGTTATTCGTACACTTTTGGCCAGGGGACCAAGCTGGA |
| | | | GATCAAA |
| 1230 | ATX-P-3314 | VL nt | GACATCCAGATGACCCAGTCTCCTTCCACCCTGTCTGCATCTGTA |
| | | | GGAGACAGCGTCACCATCACTTGCCGGGCCAGTCAGAATATTATT |
| | | | ACCTGGTTGGCTTGGTATCAGCAGAAACCAGGGAAAGCCCCTAA |
| | | | CCTCCTGATCTATAAGGCGTCTAGTTTAGAAAGTGGGGTCCCATC |
| | | | AAGGTTCAGCGGCAGTGGATCTGGGACAGAATTCACTCTCACCAT |
| | | | CAGCAGCCTGCAGCCTGATGATTTTGCAACTTATTACTGCCAACA |
| | | | GTATAGTAGTTATTCGTACACTTTTGGCCAGGGGACCAAGCTGGA |
| | | | GATCAAA |
| 1231 | ATX-P-3319 | VL nt | GCCATCCAGATGACCCAGTCTCCATCCTCCCTGTCTGCATCTGTA |
| | | | GGAGACAGAGTCACCATCACTTGCCGGGCAAGTCAGGGCATTAG |
| | | | AAATGATTTAGGCTGGTATCAGCAGAAACCAGGGAAAGCCCCTA |
| | | | AGCTCCTGATCTATGCTGCATCCAGTTTACAAAGTGGGGTCCCAT |
| | | | CAAGGTTCAGCGGCAGTGGATCTGGCACAGATTTCACTCTCACCA |
| | | | TCAGCAGCCTGCAGCCTGAAGATTTTGCAACTTATTACTGTCTAC |
| | | | AAGATTACAATTACCCGTGGACGTTCGGCCAAGGGACCAAGGTG |
| | | | GAAATCAAA |
| 1232 | ATX-P-3321 | VL nt | GACATCGTGATGACCCAGTCTCCAGACTCCCTGGCTGTGTCTCTG |
| | | | GGCGAGAGGGCCACCATCAACTGCAAGTCCAGCCAGACTGTTTT |
| | | | GTACAGGTCCAACAATAAGAACTACTTAGCTTGGTATCAGCAGA |
| | | | AACCAGGACAGCCTCCTAAGCTGCTCATTTACTGGGCATCTACCC |
| | | | GGGAATCCGGGGTCCCTGACCGATTCAGTGGCAGCGGGTCTGGG |
| | | | ACAGATTTCACTCTCACCATCAGCAGCCTGCAGGCTGAAGATGTG |
| | | | GCAGTTTATTACTGTCAGCAATATTATAGTACTCCGTGGACGTTC |
| | | | GGCCAAGGGACCAAGGTGGAAATCAAA |
| 1233 | ATX-P-3328 | VL nt | GCCATCCAGATGACCCAGTCTCCATCCTCCCTGTCTGCTTCTGTAG |
| | | | GAGACAGAGTCACCATCACTTGCCGGGCAAGTCAGGGCATTAGA |
| | | | AATGATTTAGGCTGGTATCAGCAGAATCCCGGGAAAGCCCCTAA |
| | | | GCTCCTGATTTATGCTGCATCCAATTTACAAAGTGGGGTCCCATC |
| | | | AAGGTTCAGCGGCAGTGGATCTGGCACAGATTTCACTCTCACCAT |
| | | | CAGCAGCCTGCAGCCTGAAGATTTTGTTACTTATTACTGTCTACA |
| | | | AGATTACAATTGGCCGTGGACGTTCGGCCAAGGGACACGACTGG |
| | | | AGATTAAA |
| 1234 | ATX-P-3330 | VL nt | GACATCCAGATGACCCAGTCTCCATCCTCCCTGTCTGCATCTGTA |
| | | | GGAGACAGAGTCACCATCACTTGCCGGGCAAGTCAGAGCATTAG |
| | | | CAACTATTTAAATTGGTATCAACAGAAACCAGAGAAAGCCCCTA |
| | | | AGTTCCTGATCTATGCTGCATCCAGTTTGCAAAGTGGGGTCCCAT |
| | | | CAAGGTTCAGTGGCAGTGGATCTGGGACAGATTTCACTCTCACCA |
| | | | TCAGCAGTCTGCAACCTGAAGATTTTGCAACTTACTACTGTCAAC |
| | | | AGAGTTACAGTTCCCCGCTCACTTTCGGCGGAGGGACCAAGGTGG |
| | | | AGATCAAA |
| 1235 | ATX-P-3331 | VL nt | GAAATTGTGTTGACTCAGTCTCCAGACTTTCAGTCTGTGACTCCA |
| | | | AAGGAGAAAGTCACCATCACCTGCCGGGCCAGTCAGAGCATTGG |
| | | | TAGTAACTTACACTGGTTCCAGCAGAAACCAGATCAGTCTCCAAA |
| | | | ACTCCTCATCAAGTATGCTTCCCAGTCCTTCTCAGGGGTCCCCTCG |
| | | | AGGTTCAGTGGCAGTGGATCTGGGACAGATTTCACCCTCACCATC |
| | | | AATAGCCTGGAAGCTGAAGATGCTGCAATGTATTACTGTCATCAG |
| | | | AGTAGTAGTTTACCTCGGACGTTCGGCCAAGGGACCAAGGTGGA |
| | | | AATCAAA |
| 1236 | ATX-P-3335 | VL nt | GCCATCCAGATGACCCAGTCTCCATCCTCCCTGTCTGCATCTGTA |
| | | | GGAGACAGAGTCACCATCACTTGCCGGGCAAGTCAGGGCATTAG |
| | | | AAATGATTTAGGCTGGTATCAGCAGAAACCAGGGAAAGCCCCTA |
| | | | AGCTCCTGATCTATGCTGCATCCAGTTTACAAAGTGGGGTCCCAT |
| | | | CAAGGTTCAGCGGCAGTGGATCTGGCACAGATTTCACTCTCACCA |
| | | | TCAGCAGCCTGCAGCCTGAAGATTTTGCATCTTATTACTGTCTAC |
| | | | AAGATTACAATTGGCCGTACACTTTTGGCCAGGGGACCAAGCTGG |
| | | | AGATCAAA |
| 1237 | ATX-P-3336 | VL nt | GAAATTGTGTTGACGCAGTCTCCAGGCACCCTGTCTTTGTCTCCA |
| | | | GGGGAAAGAGCCACCCTCTCCTGCAGGGCCAGTCAGAGTGTTAG |
| | | | AAGCAGCTACTTTGCCTGGTACCAGCAGAAACCTGGCCAGGCTCC |
| | | | CAGGCTCCTCATCTATGGTGCATCCAGCAGGGCCACTGGCATCCC |
| | | | AGACAGGTTCAGTGGCAGTGGGTCTGGGACAGACTTCACTCTCAC |
| | | | CATCAGCAGACTGGAGCCTGAAGATTTTGCAGTGTATTACTGTCA |
| | | | GCAGTATGGTAGCTCACCTCGGACGTTCGGCCAAGGGACCAAGG |
| | | | TGGAAATCAAA |
| 1238 | ATX-P-3337 | VL nt | GACATCGTGATGACCCAGTCTCCAGACTCCCTGGCTGTGTCTCTG |
| | | | GGCGAGAGGGCCACCATCAACTGCAAGTCCAGCCAGAGTGTTTT |
| | | | ATACAGCTCCAACAATAAGAACTACTTAGCTTGGTACCAGCAGA |
| | | | AACCAGGACAGCCTCCTAAGCTGCTCATTTACTGGGCATCTACCC |
| | | | GGGAATCCGGGGTCCCTGACCGATTCAGTGGCAGCGGGTCTGGG |
| | | | ACAGATTTCACTCTCACCATCAGCAGCCTGCAGGCTGAAGATGTG |
| | | | GCAGTTTATTACTGTCAGCAATATTTTGGTACTCCTCGGACGTTCG |
| | | | GCCAAGGGACCAAGGTGGAAATCAAA |
| 1239 | ATX-P-3340 | VL nt | GAAATTGTGTTGACACAGTCTCCAGCCACCCTGTCTTTGTCTCCA |
| | | | GGGGAAAGAGCCACCCTCTCCTGCAGGGCCAGTCAGAGTGTTAG |
| | | | CAGCTACTTAGCCTGGTACCAACAGAAACCTGGCCAGGCTCCCAG |
| | | | GCTCCTCATCTATGATGCATCCAACAGGGCCACTGGCATCCCAGC |
| | | | CAGGTTCAGTGGCAGTGGGTCTGGGACAGACTTCACTCTCACCAT |
| | | | CAGCAGCCTGCAGTCTGAAGATTTTGCAGTTTATTACTGTCAGCA |
| | | | GCGTAGCAATTGGCCGCTCACTTTCGGCGGAGGGACCAAGGTGG |
| | | | AGATCAAA |
| 1240 | ATX-P-3342 | VL nt | GACATCCAGATGACCCAGTCTCCATCCTCCCTGTCTGCATCTGTA |
| | | | GGAGACAGAGTCACCATCACTTGCCGGGCAAGTCAGACCATTAG |
| | | | GAGCTATTTAAATTGGTATCAGCAGAAACCAGGGAAAGCCCCTA |
| | | | AGCTCCTGATCTATGCTGCATCCAGTTTGCAAAGTGGGGTCCCAT |
| | | | CAAGGTTCAGTGGCAGTGGATCTGGGACAAATTTCACTCTCACCA |
| | | | TCAGCAGTCTGCAACCTGAAGATTTTGCAACTTACTCCTGTCAAC |
| | | | AGAGTTACACTACCCCGCTCACTTTCGGCGGAGGGACCAAGGTG |
| | | | GAGATCAAA |
| 1241 | ATX-P-3344 | VL nt | GAAATTGTGTTGACGCAGTCTCCAGGCACCCTGTCTTTGTCTCCA |
| | | | GGGGAAAGAGCCACCCTCTCCTGCAGGGCCAGTCAGAGTATTAG |
| | | | CAGCAGCTACTTAGCCTGGTACCAGCGGGAACCTGGCCAGGCTCC |
| | | | CAGGCTCCTCATCTATGGTGCATCCAGCAGGGCCACTGGCATCCC |
| | | | AGACAGGTTCAGTGGCAGTGGGTCTGGGACAGACTTCACTCTCAC |
| | | | CATCAGCAGACTGGAGCCTGAAGATTTTGTAGTGTATTACTGTCA |
| | | | ACAATATGGTAGCTCACCGATCACCTTCGGCCAAGGGACACGACT |
| | | | GGAGATTAAA |
| 1242 | ATX-P-3347 | VL nt | GAAATTGTGTTGACGCAGTCTCCAGGCACCCTGTCTTTGTCTCCA |
| | | | GGGGAAAGAGCCACCCTCTCCTGCAGGGCCAGTCAGAGTGTTCG |
| | | | CAGCAGCTACTTAGCCTGGTACCAGCAGAAACCTGGCCAGGCTCC |
| | | | CAGGCTCCTCATCTATGGTGCATCCAGCAGGGCCACTGGCATCCC |
| | | | AGACAGGTTCAGTGGCAGTGGGTCTGGGACAGACTTCACTCTCAC |
| | | | CTTCAGCAGACTGGAGCCTGAAGATTTTGCAGTGTATTACTGTCA |
| | | | GCAGTATGGTAGCTCACCGTACACTTTTGGCCAGGGGACCAAGCT |
| | | | GGAGATCAAA |
| 1243 | ATX-P-3348 | VL nt | GACATCCAGATGACCCAGTCTCCATCCTCCCTGTCTGCATCTGTA |
| | | | GGAGACAGAGTCACCATCACTTGCCAGGCGAGTCAGGACATTAG |
| | | | CAACTATTTAAATTGGTATCAGCAGAAACCAGGGAAAGCCCCTA |
| | | | AGCTCCTGATCTACGATGCATCCAATTTGGAAACAGGGGTCCCAT |
| | | | CAAGGTTCAGTGGAAGTGGATCTGGGACAGATTTTACTTTCACCA |
| | | | TCAGCAGCCTGCAGCCTGAAGATTTTGCAACTTACTATTGTCAAC |
| | | | AGGCTAACAGTTTCCCGCTCACTTTCGGCGGAGGGACCAAGGTGG |
| | | | AGATCAAA |
| 1244 | ATX-P-3349 | VL nt | GAAATTGTGTTGACGCAGTCTCCAGGCACCCTGTCTTTGTCTCCA |
| | | | GGGGAAAGAGCCACCCTCTCCTGCAGGGCCAGTCAGAGTGTTAG |
| | | | CAGCAGCTACTTAGCCTGGTACCAGCAGAAACCTGGCCAGGCTCC |
| | | | CAGGCTCCTCATCTATGGTGCATCCAGCAGGGCCACTGGCATCCC |
| | | | AGACAGGTTCAGTGGCAGTGGGTCTGGGACAGACTTCACTCTCAC |
| | | | CATCAGCAGACTGGAGCCTGAAGATTTTGCAGTGTATTACTGTCA |
| | | | GCAGTATGGTAGCTCACCATTCACTTTCGGCCCTGGGACCAAAGT |
| | | | GGATATCAAA |
| 1245 | ATX-P-3350 | VL nt | GACATCGTGATGACCCAGTCTCCAGACTCCCTGGCTGTGTCTCTG |
| | | | GGCGAGAGGGCCACCATCAACTGCAAGTCCAGCCAGAGTGTTTT |
| | | | ATACAGCTCCAACAATAAGAACTACTTAGCTTGGTACCAGCAGA |
| | | | AACCAGGACAGCCTCCTAAGCTGCTCATTTACTGGGCATCTACCC |
| | | | GGGAATCCGGGGTCCCTGACCGATTCAGTGGCAGCGGGTCTGGG |
| | | | ACAGATTTCACTCTCACCATCAGCAGCCTGCAGGCTGAAGATGTG |
| | | | GCAGTTTATTACTGTCAGCAATATTATAGTACTCCGTGGACGTTC |
| | | | GGCCAAGGGACACGACTGGAGATTAAA |
| 1246 | ATX-P-3351 | VL nt | GACATCCAGATGACCCAGTCTCCATCCTCCCTGTCTGCATCTGTA |
| | | | GGAGACAGAGTCACCATCACTTGCCGGGCGAGTCAGGACATTAG |
| | | | CAACTATTTAAATTGGTATCAGCAGAAACCAGGGAAAGCCCCTA |
| | | | AGCTCCTGATCTATGCTGCATCCAGTTTGGAAAGTGGGGTCCCAT |
| | | | CAAGGTTCAGTGGCAGTGGATCTGGGACAGATTTCACTCTCACCA |
| | | | TCAGCAGTCTGCAACCTGAAGATTTTGCAACTTACTACTGTCAAC |
| | | | AGAGTTACAGTACCCCTACTTTCGGCGGAGGGACCAAGGTGGAG |
| | | | ATCAAA |
| 1247 | ATX-P-3353 | VL nt | GACATCGTGATGACCCAGTCTCCAGACTCCCTGGCTGTGTCTCTG |
| | | | GGCGAGAGGGCCACCATCAACTGCAAGTCCAGCCAGAGTGTTTT |
| | | | ATACAGGTCCAACAATAAGAACTACTTAGCTTGGTACCAGCAGA |
| | | | AACCAGGCCAGCCTCCTAAACTGCTCATTTACTGGGCATCTACCC |
| | | | GGGAATCCGGGGTCCCTGACCGATTCAGTGGCAGCGGGTCTGGG |
| | | | ACAGATTTCACTCTCACCATCAGCAGCCTGCAGGCTGAAGATGTG |
| | | | GCAGTTTATTACTGTCAGCAATATTATGGTACTCCTCGGACGTTC |
| | | | GGCCAAGGGACCAAGGTGGAAATCAAA |
| 1248 | ATX-P-3354 | VL nt | GACATCCAGATGACCCAGTCTCCATCCTCCCTGTCTGCATCTGTA |
| | | | GGAGACAGAGTCACCATCACTTGCCAGGCGAGTCAGGACATTAA |
| | | | GAACTGTTTAAATTGGTATCAGCAGAAACCAGGGAAAGCCCCTA |
| | | | AGCTCCTGATCTACGATGCATCCAATTTGGAAACAGGGGTCCCAT |
| | | | CAAGGTTCAGTGGAAGTGGATCTGGGACAGATTTTACTTTCACCA |
| | | | TCAGCAGCCTGCAGCCTGAAGATATTGCAACATATTACTGTCAAC |
| | | | AGTTTGATAATCTCCCTCTCACTTTCGGCGGAGGGACCAAGGTGG |
| | | | AGATCAAA |
| 1249 | ATX-P-3355 | VL nt | GACATCGTGATGACCCAGTCTCCAGACTCCCTGGCTGTGTCTCTG |
| | | | GGCGAGAGGGCCACCATCAACTGCAAGTCCAGCCAGACTATTTT |
| | | | ATACAGGTCCAACATTAAGAACTACTTAGCTTGGTACCAGCAGAA |
| | | | ACCAGGACAGCCTCCTAAACTGCTCATTTCCTGGGCATCTACCCG |
| | | | GGAATCCGGGGTCCCTGACCGATTCAGTGGCAGCGGGTCTGGGA |
| | | | CAGATTTCACTCTCACCATCAGCAGCCTGCAGGCTGAAGATGTGG |
| | | | CAGTTTATTACTGTCAGCAATATTATAGTACTCGGACGTTCGGCC |
| | | | AGGGGACCAAGCTGGAGATCAAA |
| 1250 | ATX-P-3356 | VL nt | GACATCGTGATGACCCAGTCTCCAGACTCCCTGGCTGTGTCTCTG |
| | | | GGCGAGAGGGCCACCATCAACTGCAAGTCCAGCCAGAGTGTTTT |
| | | | ATACAGCTCCAACAATAAGAACTACTTAGCTTGGTACCAGCAGA |
| | | | AACCAGGACAGCCTCCTAAGCTGCTCATTTACTGGGCATCTACCC |
| | | | GGGAATCCGGGGTCCCTGACCGATTCAGTGGCAGCGGGTCTGGG |
| | | | ACAGATTTCACTCTCACCATCAGCAGCCTGCAGGCTGAAGATGTG |
| | | | GCAGTTTATTACTGTCAGCAATATTATAGTACTCCTCGGACGTTC |
| | | | GGCCAAGGGACCAAGGTGGAAATCAAA |
| 1251 | ATX-P-3358 | VL nt | GACATCCAGATGACCCAGTCTCCTTCCACCCTGTCTGCATCTGTA |
| | | | GGAGACAGAGTCACTATCACTTGTCGGGCGAGTCAGGGTATTAG |
| | | | CAGCTGGTTAGCCTGGTATCAGCAGAAACCAGGGAAAGCCCCTA |
| | | | AACTCCTGATCTATGCTGCATCCAGTTTGCAGAGTGGGGTCCCAT |
| | | | CAAGGTTCAGCGGCAGTGGATCTGGGACAGATTTCACTCTCACCA |
| | | | TCAGCAGCCTGCAGCCTGAAGATTTTGCAACTTACTATTGTCAAC |
| | | | AGGCTAACAGTTTCCCTCTCACTTTCGGCGGAGGGACCAAGGTGG |
| | | | AGATCAAA |
| 1252 | ATX-P-3359 | VL nt | GACATCGTGATGACCCAGTCTCCAGACTCCCTGGCTGTGTCTCTG |
| | | | GGCGAGAGGGCCACCATCAACTGCAAGTCCAGCCAGAGTGTTTT |
| | | | ATACAGCTCCAACAATAAGAACTACTTAGCTTGGTACCAGCAGA |
| | | | AACCAGGACAGCCTCCTAAGCTGCTCATTTACTGGGCATCTACCC |
| | | | GGGAATCCGGGGTCCCTGACCGATTCAGTGGCAGCGGGTCTGGG |
| | | | ACAGATTTCACTCTCACCATCAGCAGCCTGCAGGCTGAAGATGTG |
| | | | GCAGTTTATTACTGTCAGCAATATTATAGTACTCCTCCGACGTTCG |
| | | | GCCAAGGGACCAAGGTGGAAATCAAA |
| 1253 | ATX-P-3362 | VL nt | GACATCCAGATGACCCAGTCTCCATCCTCCCTGTCTGCATCTGTA |
| | | | GGAGACAGAGTCACCATCACTTGCCGGGCAAGTCAGAGCATTAG |
| | | | CAGCTATTTAAATTGGTATCAGCAGAAACCAGGGAAAGCCCCTA |
| | | | AGCTCCTGATCTATGCTGCATCCAGTTTGCAAAGTGGGGTCCCAT |
| | | | CAAGGTTCAGTGGCAGTGGATCTGGGACAGATTTCACTCTCACCA |
| | | | TCAGCAGTCTGCAACCTGAAGATTTTGCAACTTACTACTGTCAAC |
| | | | AGAGTTACAGTACCCCGTACACTTTTGGCCAGGGGACCAAGCTGG |
| | | | AGATCAAA |
| 1254 | ATX-P-3363 | VL nt | GACATCGTGATGACCCAGTCTCCAGACTCCCTGGCTGTGTCTCTG |
| | | | GGCGAGAGGGCCACCATCAACTGCAAGTCCAGCCAGAGTGTTTT |
| | | | ATACAGCTCCAACAATAAGAACTACTTAGCTTGGTACCAGCAGA |
| | | | AACCAGGACAGCCTCCTAAGCTGCTCATTTACTGGGCATCTACCC |
| | | | GGGAATCCGGGGTCCCTGACCGATTCAGTGGCAGCGGGTCTGGG |
| | | | ACAGATTTCACTCTCACCATCAGCAGCCTGCAGGCTGAAGATGTG |
| | | | GCAGTTTATTACTGTCAGCAATTTTATGATACTCCTCGGACGTTCG |
| | | | GCCAAGGGACCAAGGTGGAAATCAAA |
| 1255 | ATX-P-3366 | VL nt | GACATCCAGATGACCCAGTCTCCATCCTCCCTGTCTGCATCTGTA |
| | | | GGAGACAGAGTCACCATCACTTGCCGGGCGAGTCAGGGCATTAG |
| | | | CAATTATTTAGCCTGGTATCAGCAGAAACCAGGGAAAGTTCCTAA |
| | | | GCTCCTGATCTATGTTGCATCCACTTTGCAATCAGGGGTCCCATCT |
| | | | CGGTTCAGTGGCAGTGGATCTGGGACAGATTTCACTCTCACCATC |
| | | | AGCAGCCTGCAGCCTGAAGATGTTGCAACTTATTACTGTCAAAAT |
| | | | TATATCAGTGCCCCGCTCACTTTCGGCGGAGGGACCAAGGTGGAG |
| | | | ATCAAA |
| 1256 | ATX-P-3367 | VL nt | GACATCGTGATGACCCAGTCTCCAGACTCCCTGGCTGTGTCTCTG |
| | | | GGCGAGAGGGCCACCATCAACTGCAAGTCCAGCCAGAGTGTTTT |
| | | | ATACAGCTCCAACAATAAGAACTACTTAGCTTGGTACCAGCAGA |
| | | | AACCAGGACAGCCTCCTAAGCTGCTCATTTACTGGGCATCTACCC |
| | | | GGGAATCCGGGGTCCCTGACCGATTCAGTGGCAGCGGGTCTGGG |
| | | | ACAGATTTCACTCTCACCATCAGCAGCCTGCAGGCTGAAGATGTG |
| | | | GCAGTTTATTACTGTCAGCAATATTATAGTACTCCGTGGACGTTC |
| | | | GGCCAAGGGACCAAGGTGGAAATCAAA |
| 1257 | ATX-P-3368 | VL nt | GAAATTGTGTTGACGCAGTCTCCAGGCACCCTGTCTTTGTCTCCA |
| | | | GGGGAAAGAGCCACCCTCTCCTGCAGGGCCAGTCAGAGTGTTAG |
| | | | CAGCAGCTACTTAGCCTGGTACCAGCAGAAACCTGGCCAGGCTCC |
| | | | CAGGCTCCTCATCTATGGTGCATCCAGCAGGGCCACTGGCATCCC |
| | | | AGACAGGTTCAGTGGCAGTGGGTCTGGGACAGACTTCACTCTCAC |
| | | | CATCAGCAGACTGGAGCCTGAAGATTTTGCAGTGTATTACTGTCA |
| | | | GCAGTATGGTAGCTCACCGTACACTTTTGGCCAGGGGACCAAGCT |
| | | | GGAGATCAAA |
| 1258 | ATX-P-3369 | VL nt | GACATCCAGATGACCCAGTCTCCATCCTCCCTGTCTGCATCTGTA |
| | | | GGAGACAGAGTCAACATCACTTGCCGGGCGAGTCAGGGCATTAG |
| | | | CAATTATTTAGCCTGGTATCAGCAGAAACCAGGGAAAGTTCCTAA |
| | | | GCTCCTGATCTATGCTGCATCCACTTTGCAATCAGGGGTCCCATCT |
| | | | CGTTTCAGTGGCAGTGGATCTGGGACAGATTTCACTCTCACCATC |
| | | | AGCAGCCTGCAGCCTGAAGATGTTGCAAGTTATTTCTGTCAAAAA |
| | | | TATATCAGTGCCCCGCTCACTTTCGGCGGAGGGACCAAGGTGGAG |
| | | | ATCAAA |
| 1259 | ATX-P-3370 | VL nt | GACATCCAGATGACCCAGTCTCCATCCTCCCTGTCTGCATCTGTA |
| | | | GGAGACAGAGTCACCATCACTTGCCGGGCGAGTCAGGGCATTAG |
| | | | CAATTATTTAGCCTGGTATCAGCAGAAACCAGGGAAAGTTCCTAA |
| | | | GCTCCTGATCTATGCTGCATCCACTTTGCAATCAGGGGTCCCATCT |
| | | | CGGTTCAGTGGCAGTGGATCTGGGACAGATTTCACTCTCACCATC |
| | | | AGCAGCCTGCAGCCTGAAGACGTTGCAAGTTATTACTGTCAAGAT |
| | | | TATACCAGTGCCCCGCTCACTTTCGGCGGAGGGACCAAGGTGGA |
| | | | GATCAAA |
| 1260 | ATX-P-3371 | VL nt | GAAATTGTGTTGACGCAGTCTCCAGGCACCCTGTCTTTGTCTCCA |
| | | | GGGGAAAGAGCCACCCTCTCCTGCAGGGCCAGTCAGAGTGTTAG |
| | | | TGACAGCTACTTAGCCTGGTACCAGCAGGAACCTGGCCAGGCGC |
| | | | CCAGGCTCCTCATCTATGGTGCATCCAGCAGGGCCACTGGCATCC |
| | | | CAGACAGGTTCAGTGGCAGTGGGTCTGGGACAGACTTCACTCTCA |
| | | | CCATCAGCAGACTGGAGCCTGAAGATTTTGCATTATATTACTGTC |
| | | | AGCAATATGATTCCTCGCCATTCACTTTCGGCCCTGGGACCAAAG |
| | | | TGGATATCAAA |
| 1261 | ATX-P-3472 | VL nt | GACATCGTGATGACCCAGTCTCCAGACTCCCTGGCTGTGTCTCTG |
| | | | GGCGAGAGGGCCACCATCAACTGCAAGTCCAGCCAGAGTGTTTT |
| | | | ATACAGCTCCAACAATAAGAACTACTTAGCTTGGTACCAGCAGA |
| | | | AACCAGGACAGCCTCCTAAGCTGCTCATTTACTGGGCATCTACCC |
| | | | GGGAATCCGGGGTCCCTGACCGATTCAGTGGCAGCGGGTCTGGG |
| | | | ACAGATTTCACTCTCACCATCAGCAGCCTGCAGGCTGAAGATGTG |
| | | | GCAGTTTATTACTGTCAGCAATATTATAGTACTCCGTACACTTTTG |
| | | | GCCAGGGGACCAAGCTGGAGATCAAA |
| 1262 | ATX-P-3361 | VL nt | GACATCGTGATGACCCAGTCTCCAGACTCCCTGGCTGTGTCTCTG |
| | | | GGCGAGAGGGCCACCATCAACTGCAAGTCCAGCCAGAGTGTTTT |
| | | | ATACAGCTCCAACAATAAGAACTACTTAGCTTGGTACCAGCAGA |
| | | | AACCAGGACAGCCTCCTAAGCTGCTCATTTACTGGGCATCTAACC |
| | | | GGGAATCCGGGGTCCCTGACCGATTCAGTGGCTCCGGGTCTGGGA |
| | | | CAGATTTCACTCTCACCATCAGCAGCCTGCAGGCTGAAGATGTGG |
| | | | CAGTTTATTACTGTCAGCAATATTATAGTACTCCGTACACTTTTGG |
| | | | CCAGGGGACCAAGCTGGAGATCAAA |
| 1263 | ATX-P-3366 | VL nt | GACATCGTGATGACCCAGTCTCCAGACTCCCTGGCTGTGTCTCTG |
| | | | GGCGAGAGGGCCACCATCAACTGCAAGTCCAGCCAGAGTGTTTT |
| | | | ATACAGCTCCAACAATAAGAACTACTTAGCTTGGTACCAGCAGA |
| | | | AACCAGGACAGCCTCCTAAGCTGCTCATTTACTGGGCATCTAACC |
| | | | GGGAATCCGGGGTCCCTGACCGATTCAGTGGCTCCGGGTCTGGGA |
| | | | CAGATTTCACTCTCACCATCAGCAGCCTGCAGGCTGAAGATGTGG |
| | | | CAGTTTATTACTGTCAGCAATATTATAGTACTCCGTACACTTTTGG |
| | | | CCAGGGGACCAAGCTGGAGATCAAA |
| 1264 | ATX-P-3376 | VL nt | GACATCGTGATGACCCAGTCTCCAGACTCCCTGGCTGTGTCTCTG |
| | | | GGCGAGAGGGCCACCATCAACTGCAAGTCCAGCCAGAGTGTTTT |
| | | | ATACAGCTCCAACAATAAGAACTACTTAGCTTGGTACCAGCAGA |
| | | | AACCAGGACAGCCTCCTAAGCTGCTCATTTACTGGGCATCTAACC |
| | | | GGGAATCCGGGGTCCCTGACCGATTCAGTGGCTCCGGGTCTGGGA |
| | | | CAGATTTCACTCTCACCATCAGCAGCCTGCAGGCTGAAGATGTGG |
| | | | CAGTTTATTACTGTCAGCAATATTATAGTACTCCGTACACTTTTGG |
| | | | CCAGGGGACCAAGCTGGAGATCAAA |
| 1265 | ATX-P-3377 | VL nt | GACATCGTGATGACCCAGTCTCCAGACTCCCTGGCTGTGTCTCTG |
| | | | GGCGAGAGGGCCACCATCAACTGCAAGTCCAGCCAGAGTGTTTT |
| | | | ATACAGCTCCAACAATAAGAACTACTTAGCTTGGTACCAGCAGA |
| | | | AACCAGGACAGCCTCCTAAGCTGCTCATTTACTGGGCATCTAACC |
| | | | GGGAATCCGGGGTCCCTGACCGATTCAGTGGCTCCGGGTCTGGGA |
| | | | CAGATTTCACTCTCACCATCAGCAGCCTGCAGGCTGAAGATGTGG |
| | | | CAGTTTATTACTGTCAGCAATATTATAGTACTCCGTACACTTTTGG |
| | | | CCAGGGGACCAAGCTGGAGATCAAA |
| 1266 | ATX-P-3418 | VL nt | GACATCCAGATGACCCAGTCTCCATCCTCCCTGTCTGCATCTGTA |
| | | | GGAGACAGAGTCACCATCACCTGCCGGGCAAGTCAGACCATTAG |
| | | | AAACTTTTTAAATTGGTATCAGCGGAAACCAGGGAAAGCCCCTA |
| | | | AGATCCTGATCTATGCTGCATCCAGTTTGCAAAGTGGGGTCCCAT |
| | | | CAAGGTTCAGTGGCAGTGGATCTGGGACAGATTTCACTCTCACCA |
| | | | TCAGCAGTCTGCAACCTGCAGATTTTGCAACTTACTACTGTCAAC |
| | | | AGACTTACAGTATCCCGATCACCTTCGGCCAAGGGACACGACTGG |
| | | | AGATTAAA |
| 1267 | ATX-P-3420 | VL nt | GACATCCAGATGACCCAGTCTCCATCCTCCCTGTCTGCATCTGTA |
| | | | GGAGACAGAGTCACCATCACTTGCCGGGCAAGTCAGAGCATTAG |
| | | | CAGGTATTTAAATTGGTATCAGCAGAAACCAGGGAAAGCCCCTA |
| | | | AACTCCTGCTCTATGCTGCATCCAGTTTGCAAAGTGGGGTCCCAT |
| | | | CAAAGTTCAGCGGCAGTGGATCTGGGACAGATTTCACTCTCACCA |
| | | | TCAGCAGCCTGCAACCTGAAGATTTTGCAACTTACTACTGTCAAC |
| | | | AGAGTTACAGTTCCCCGATCACCTTCGGCCAAGGGACACGACTGG |
| | | | AGATTAAA |
| 1268 | ATX-P-3426 | VL nt | GATATTGTGATGACTCAGTCTCCACTCTCCCTGCCCGTCACCCCTG |
| | | | GAGAGCCGGCCTCCATCTCCTGCAGGTCTAGTCAGAGCCTCCTGC |
| | | | ATAGTAATGGATACAACTATTTGGATTGGTACCTGCAGAAGCCAG |
| | | | GGCAGTCTCCACAGCTCCTGATCTATTTGGGTTCTAATCGGGCCT |
| | | | CCGGGGTCCCTGACAGGTTCAGTGGCAGTGGATCAGGCACAGAT |
| | | | TTTACACTGAAAATCAGCAGAGTGGAGGCTGAGGATGTTGGGGT |
| | | | TTATTACTGCATGCAAACTCTACAAACTCCTCCGACGTTCGGCCA |
| | | | AGGGACCAAGGTGGAAATCAAA |
| 1269 | ATX-P-3432 | VL nt | GACATCCAGTTGACCCAGTCTCCATCCTTCCTGTCTGCATCTGTAG |
| | | | GAGACAGACTCACCATCACTTGCCGGGCCAGTCAGGGCATTAGC |
| | | | AGTTATTTAGCCTGGTATCAGCAAAAACCAGGGAAAGCCCCTAA |
| | | | GCTCCTGATCTATACTGCATCCACTTTACAAAGTGGGGTCCCATC |
| | | | AAGGTTCAGCGGCAGTGGATCTGGGACAGAATTCACTCTCACAAT |
| | | | CAGCAGCCTGCAGCCTGAAGATTTTGCAACTTATTACTGTCAACA |
| | | | GCTTAATGGTTACCCTCCGACGTTCGGCCAAGGGACCAAGGTGGA |
| | | | AATCAAA |
| 1270 | ATX-P-3433 | VL nt | GACATCCAGATGACCCAGTCTCCATCCTCCCTGTCTGCATCTGTA |
| | | | GGAGACAGAGTCACCATCACTTGCCGGGCAAGTCAGAGCATTAC |
| | | | CAGCTATTTAAATTGGTATCAGCAGAAACCAGGGAAAGCCCCTA |
| | | | AGCTCCTGATCTTTGCTGCATCCAGTTTGCAAAGTGGGGTCCCAT |
| | | | CAAGGTTCAGTGGCAGTGGATCTGGGACAGATTTCACTCTCACCA |
| | | | TCAGCAGTCTGCAACCTGAAGATTTTGCAACTTACTACTGTCAAC |
| | | | AGAGTTACAGTACCCCTCTCACTTTCGGCGGAGGGACCAAGGTGG |
| | | | AGATCAAA |
| 1282 | ATX-P-3371 | VL aa | DIVMTQSPDSLAVSLGERATINCKSSQSVLYSSNNKNYLAWYQQKP |
| | | | GQPPKLLIYWASNRESGVPDRFSGSGSGTDFTLTISSLQAEDVAVYY |
| | | | CQQYYSTPYTFGQGTKLEIK |
| 1283 | ATX-P-3373 | VL aa | DIVMTQSPDSLAVSLGERATINCKSSQSVLYSSNNKNYLAWYQQKP |
| | | | GQPPKLLIYWASNRESGVPDRFSGSGSGTDFTLTISSLQAEDVAVYY |
| | | | CQQYYSTPYTFGQGTKLEIK |
| 1284 | ATX-P-3375 | VL aa | DIVMTQSPDSLAVSLGERATINCKSSQSVLYSSNNKNYLAWYQQKP |
| | | | GQPPKLLIYWASNRESGVPDRFSGSGSGTDFTLTISSLQAEDVAVYY |
| | | | CQQYYSTPYTFGQGTKLEIK |
| 1285 | ATX-P-3378 | VL aa | DIVMTQSPDSLAVSLGERATINCKSSQSVLYSSNNKNYLAWYQQKP |
| | | | GQPPELLIYWASNRESGVPDRFSGSGSGTDFTLTISSLQAEDVAVYY |
| | | | CQQYYSTPYTFGQGTKLEIK |
| 1286 | ATX-P-3382 | VL aa | DIVMTQSPDSLAVSLGERATINCKSSQSVLYSSNNKNYLAWYQQKP |
| | | | GQPPKLLIYWASNRESGVPDRFSGSGSGTDFTLTISSLQAEDVAVYY |
| | | | CQQYYSTPYTFGQGTKLEIK |
| 1287 | ATX-P-3383 | VL aa | DIVMTQSPDSLAVSLGERATINCKSSQSVLYSSNNKNYLAWYQQKP |
| | | | GQPPKLLIYWASNRESGVPDRFSGSGSGTDFTLTISSLQAEDVAVYY |
| | | | CQQYYSTPYTFGQGTKLEIK |
| 1288 | ATX-P-3384 | VL aa | DIVMTQSPDSLAVSLGERATINCKSSQSVLYSSNNKNYLAWYQQKP |
| | | | GQPPKLLIYWASNRESGVPDRFSGSGSGTDFTLTISSLQAEDVAVYY |
| | | | CQQYYSTPYTFGQGTKLEIK |
| 1289 | ATX-P-3386 | VL aa | DIVMTQSPDSLAVSLGERATINCKSSQSVLYSSNNKNYLAWYQQKP |
| | | | GQPPKLLIYWASNRESGVPDRFSGSGSGTDFTLTISSLQAEDVAVYY |
| | | | CQQYYSTPYTFGQGTKLEIK |
| 1290 | ATX-P-3387 | VL aa | DIVMTQSPDSLAVSLGERATINCKSSQSVLYSSNNKNYLAWYQQKP |
| | | | GQPPKLLIYWASNRESGVPDRFSGSGSGTDFTLTISSLQAEDVAVYY |
| | | | CQQYYSTPYTFGQGTKLEIK |
| 1291 | ATX-P-3389 | VL aa | DIVMTQSPDSLAVSLGERATINCKSSQSVLYSSNNKNYLAWYQQKP |
| | | | GQPPKLLIYWASNRESGVPDRFSGSGSGTDFTLTISSLQAEDVAVYY |
| | | | CQQYYSTPYTFGQGTKLEIK |
| 1292 | ATX-P-3391 | VL aa | DIVMTQSPDSLAVSLGERATINCKSSQSVLYSSNNKNYLAWYQQKP |
| | | | GQPPELLIYWASNRESGVPDRFSGSGSGTDFTLTISSLQAEDVAVYY |
| | | | CQQYYSTPYTFGQGTKLEIK |
| 1293 | ATX-P-3392 | VL aa | DIVMTQSPDSLAVSLGERATINCKSSQSVLYSSNNKNYLAWYQQKP |
| | | | GQPPKLLIYWASNRESGVPDRFSGSGSGTDFTLTISSLQAEDVAVYY |
| | | | CQQYYSTPYTFGQGTKLEIK |
| 1294 | ATX-P-3395 | VL aa | DIQMTQSPSTLSASVGDSVTITCRASQNIITWLAWYQQKPGKAPNLLI |
| | | | YKASSLESGVPSRFSGSGSGTEFTLTISSLQPDDFATYYCQQYSSYSY |
| | | | TFGQGTKLEIK |
| 1295 | ATX-P-3396 | VL aa | DIQMTQSPSTLSASVGDSVTITCRASQNIITWLAWYQQKPGKAPNLLI |
| | | | YKASSLESGVPSRFSGSGSGTEFTLTISSLQPDDFATYYCQQYSSYSY |
| | | | TFGQGTKLEIK |
| 1296 | ATX-P-3397 | VL aa | DIQMTQSPSTLSASVGDSVTITCRASQNIITWLAWYQQKPGKAPNLLI |
| | | | YKASSLESGVPSRFSGSGSGTEFTLTISSLQPDDFATYYCQQYSSYSY |
| | | | TFGQGTKLEIK |
| 1297 | ATX-P-3405 | VL aa | DIQMTQSPSTLSASVGDSVTITCRASQNIITWLAWYQQKPGKAPNLLI |
| | | | YKASSLESGVPSRFSGSGSGTEFTLTISSLQPDDFATYYCQQYSSYSY |
| | | | TFGQGTKLEIK |
| 1298 | ATX-P-3406 | VL aa | DIQMTQSPSTLSASVGDSVTITCRASQNIITWLAWYQQKPGKAPNLLI |
| | | | YKASSLESGVPSRFSGSGSGTEFTLTISSLQPDDFATYYCQQYSSYSY |
| | | | TFGQGTKLEIK |
| 1299 | ATX-P-3407 | VL aa | DIQMTQSPSTLSASVGDSVTITCRASQNIITWLAWYQQKPGKAPNLLI |
| | | | YKASSLESGVPSRFSGSGSGTEFTLTISSLQPDDFATYYCQQYSSYSY |
| | | | TFGQGTKLEIK |
| 1300 | ATX-P-3408 | VL aa | DIQMTQSPSTLSASVGDSVTITCRASQNIITWLAWYQQKPGKAPNLLI |
| | | | YKASSLESGVPSRFSGSGSGTEFTLTISSLQPDDFATYYCQQYSSYSY |
| | | | TFGQGTKLEIK |
| 1301 | ATX-P-3410 | VL aa | DIQMTQSPSTLSASVGDSVTITCRASQNIITWLAWYQQKPGKAPNLLI |
| | | | YKASSLESGVPSRFSGSGSGTEFTLTISSLQPDDFATYYCQQYSSYSY |
| | | | TFGQGTKLEIK |
| 1302 | ATX-P-3412 | VL aa | DIQMTQSPSTLSASVGDSVTITCRASQNIITWLAWYQQKPGKAPNLLI |
| | | | YKASSLESGVPSRFSGSGSGTEFTLTISSLQPDDFATYYCQQYSSYSY |
| | | | TFGQGTKLEIK |
| 1303 | ATX-P-3413 | VL aa | DIQMTQSPSTLSASVGDSVTITCRASQNIITWLAWYQQKPGKAPNLLI |
| | | | YKASSLESGVPSRFSGSGSGTEFTLTISSLQPDDFATYYCQQYSSYSY |
| | | | TFGQGTKLEIK |
| 1304 | ATX-P-3414 | VL aa | DIQMTQSPSTLSASVGDSVTITCRASQNIITWLAWYQQKPGKAPNLLI |
| | | | YKASSLESGVPSRFSGSGSGTEFTLTISSLQPDDFATYYCQQYSSYSY |
| | | | TFGQGTKLEIK |
| 1305 | ATX-P-3419 | VL aa | AIQMTQSPSSLSASVGDRVTITCRASQGIRNDLGWYQQKPGKAPKLL |
| | | | IYAASSLQSGVPSRFSGSGSGTDFTLTISSLQPEDFATYYCLQDYNYP |
| | | | WTFGQGTKVEIK |
| 1306 | ATX-P-3421 | VL aa | DIVMTQSPDSLAVSLGERATINCKSSQTVLYRSNNKNYLAWYQQKP |
| | | | GQPPKLLIYWASTRESGVPDRFSGSGSGTDFTLTISSLQAEDVAVYYC |
| | | | QQYYSTPWTFGQGTKVEIK |
| 1307 | ATX-P-3428 | VL aa | AIQMTQSPSSLSASVGDRVTITCRASQGIRNDLGWYQQNPGKAPKLL |
| | | | IYAASNLQSGVPSRFSGSGSGTDFTLTISSLQPEDFVTYYCLQDYNWP |
| | | | WTFGQGTRLEIK |
| 1308 | ATX-P-3430 | VL aa | DIQMTQSPSSLSASVGDRVTITCRASQSISNYLNWYQQKPEKAPKFLI |
| | | | YAASSLQSGVPSRFSGSGSGTDFTLTISSLQPEDFATYYCQQSYSSPLT |
| | | | FGGGTKVEIK |
| 1309 | ATX-P-3431 | VL aa | EIVLTQSPDFQSVTPKEKVTITCRASQSIGSNLHWFQQKPDQSPKLLIK |
| | | | YASQSFSGVPSRFSGSGSGTDFTLTINSLEAEDAAMYYCHQSSSLPRT |
| | | | FGQGTKVEIK |
| 1310 | ATX-P-3435 | VL aa | AIQMTQSPSSLSASVGDRVTITCRASQGIRNDLGWYQQKPGKAPKLL |
| | | | IYAASSLQSGVPSRFSGSGSGTDFTLTISSLQPEDFASYYCLQDYNWP |
| | | | YTFGQGTKLEIK |
| 1311 | ATX-P-3436 | VL aa | EIVLTQSPGTLSLSPGERATLSCRASQSVRSSYFAWYQQKPGQAPRLL |
| | | | IYGASSRATGIPDRFSGSGSGTDFTLTISRLEPEDFAVYYCQQYGSSPR |
| | | | TFGQGTKVEIK |
| 1312 | ATX-P-3437 | VL aa | DIVMTQSPDSLAVSLGERATINCKSSQSVLYSSNNKNYLAWYQQKP |
| | | | GQPPKLLIYWASTRESGVPDRFSGSGSGTDFTLTISSLQAEDVAVYYC |
| | | | QQYFGTPRTFGQGTKVEIK |
| 1313 | ATX-P-3440 | VL aa | EIVLTQSPATLSLSPGERATLSCRASQSVSSYLAWYQQKPGQAPRLLI |
| | | | YDASNRATGIPARFSGSGSGTDFTLTISSLQSEDFAVYYCQQRSNWPL |
| | | | TFGGGTKVEIK |
| 1314 | ATX-P-3442 | VL aa | DIQMTQSPSSLSASVGDRVTITCRASQTIRSYLNWYQQKPGKAPKLLI |
| | | | YAASSLQSGVPSRFSGSGSGTNFTLTISSLQPEDFATYSCQQSYTTPLT |
| | | | FGGGTKVEIK |
| 1315 | ATX-P-3444 | VL aa | EIVLTQSPGTLSLSPGERATLSCRASQSISSSYLAWYQREPGQAPRLLI |
| | | | YGASSRATGIPDRFSGSGSGTDFTLTISRLEPEDFVVYYCQQYGSSPIT |
| | | | FGQGTRLEIK |
| 1316 | ATX-P-3447 | VL aa | EIVLTQSPGTLSLSPGERATLSCRASQSVRSSYLAWYQQKPGQAPRL |
| | | | LIYGASSRATGIPDRFSGSGSGTDFTLTFSRLEPEDFAVYYCQQYGSS |
| | | | PYTFGQGTKLEIK |
| 1317 | ATX-P-3448 | VL aa | DIQMTQSPSSLSASVGDRVTITCQASQDISNYLNWYQQKPGKAPKLL |
| | | | IYDASNLETGVPSRFSGSGSGTDFTFTISSLQPEDFATYYCQQANSFPL |
| | | | TFGGGTKVEIK |
| 1318 | ATX-P-3449 | VL aa | EIVLTQSPGTLSLSPGERATLSCRASQSVSSSYLAWYQQKPGQAPRLL |
| | | | IYGASSRATGIPDRFSGSGSGTDFTLTISRLEPEDFAVYYCQQYGSSPF |
| | | | TFGPGTKVDIK |
| 1319 | ATX-P-3450 | VL aa | DIVMTQSPDSLAVSLGERATINCKSSQSVLYSSNNKNYLAWYQQKP |
| | | | GQPPKLLIYWASTRESGVPDRFSGSGSGTDFTLTISSLQAEDVAVYYC |
| | | | QQYYSTPWTFGQGTRLEIK |
| 1320 | ATX-P-3451 | VL aa | DIQMTQSPSSLSASVGDRVTITCRASQDISNYLNWYQQKPGKAPKLL |
| | | | IYAASSLESGVPSRFSGSGSGTDFTLTISSLQPEDFATYYCQQSYSTPT |
| | | | FGGGTKVEIK |
| 1321 | ATX-P-3453 | VL aa | DIVMTQSPDSLAVSLGERATINCKSSQSVLYRSNNKNYLAWYQQKP |
| | | | GQPPKLLIYWASTRESGVPDRFSGSGSGTDFTLTISSLQAEDVAVYYC |
| | | | QQYYGTPRTFGQGTKVEIK |
| 1322 | ATX-P-3454 | VL aa | DIQMTQSPSSLSASVGDRVTITCQASQDIKNCLNWYQQKPGKAPKLL |
| | | | IYDASNLETGVPSRFSGSGSGTDFTFTISSLQPEDIATYYCQQFDNLPL |
| | | | TFGGGTKVEIK |
| 1323 | ATX-P-3455 | VL aa | DIVMTQSPDSLAVSLGERATINCKSSQTILYRSNIKNYLAWYQQKPG |
| | | | QPPKLLISWASTRESGVPDRFSGSGSGTDFTLTISSLQAEDVAVYYCQ |
| | | | QYYSTRTFGQGTKLEIK |
| 1324 | ATX-P-3456 | VL aa | DIVMTQSPDSLAVSLGERATINCKSSQSVLYSSNNKNYLAWYQQKP |
| | | | GQPPKLLIYWASTRESGVPDRFSGSGSGTDFTLTISSLQAEDVAVYYC |
| | | | QQYYSTPRTFGQGTKVEIK |
| 1325 | ATX-P-3458 | VL aa | DIQMTQSPSTLSASVGDRVTITCRASQGISSWLAWYQQKPGKAPKLL |
| | | | IYAASSLQSGVPSRFSGSGSGTDFTLTISSLQPEDFATYYCQQANSFPL |
| | | | TFGGGTKVEIK |
| 1326 | ATX-P-3459 | VL aa | DIVMTQSPDSLAVSLGERATINCKSSQSVLYSSNNKNYLAWYQQKP |
| | | | GQPPKLLIYWASTRESGVPDRFSGSGSGTDFTLTISSLQAEDVAVYYC |
| | | | QQYYSTPPTFGQGTKVEIK |
| 1327 | ATX-P-3462 | VL aa | DIQMTQSPSSLSASVGDRVTITCRASQSISSYLNWYQQKPGKAPKLLI |
| | | | YAASSLQSGVPSRFSGSGSGTDFTLTISSLQPEDFATYYCQQSYSTPY |
| | | | TFGQGTKLEIK |
| 1328 | ATX-P-3463 | VL aa | DIVMTQSPDSLAVSLGERATINCKSSQSVLYSSNNKNYLAWYQQKP |
| | | | GQPPKLLIYWASTRESGVPDRFSGSGSGTDFTLTISSLQAEDVAVYYC |
| | | | QQFYDTPRTFGQGTKVEIK |
| 1329 | ATX-P-3466 | VL aa | DIQMTQSPSSLSASVGDRVTITCRASQGISNYLAWYQQKPGKVPKLL |
| | | | IYVASTLQSGVPSRFSGSGSGTDFTLTISSLQPEDVATYYCQNYISAPL |
| | | | TFGGGTKVEIK |
| 1330 | ATX-P-3467 | VL aa | DIVMTQSPDSLAVSLGERATINCKSSQSVLYSSNNKNYLAWYQQKP |
| | | | GQPPKLLIYWASTRESGVPDRFSGSGSGTDFTLTISSLQAEDVAVYYC |
| | | | QQYYSTPWTFGQGTKVEIK |
| 1331 | ATX-P-3468 | VL aa | EIVLTQSPGTLSLSPGERATLSCRASQSVSSSYLAWYQQKPGQAPRLL |
| | | | IYGASSRATGIPDRFSGSGSGTDFTLTISRLEPEDFAVYYCQQYGSSPY |
| | | | TFGQGTKLEIK |
| 1332 | ATX-P-3469 | VL aa | DIQMTQSPSSLSASVGDRVNITCRASQGISNYLAWYQQKPGKVPKLL |
| | | | IYAASTLQSGVPSRFSGSGSGTDFTLTISSLQPEDVASYFCQKYISAPL |
| | | | TFGGGTKVEIK |
| 1333 | ATX-P-3470 | VL aa | DIQMTQSPSSLSASVGDRVTITCRASQGISNYLAWYQQKPGKVPKLL |
| | | | IYAASTLQSGVPSRFSGSGSGTDFTLTISSLQPEDVASYYCQDYTSAP |
| | | | LTFGGGTKVEIK |
| 1334 | ATX-P-3471 | VL aa | EIVLTQSPGTLSLSPGERATLSCRASQSVSDSYLAWYQQEPGQAPRLL |
| | | | TYGASSRATGIPDRFSGSGSGTDFTLTISRLEPEDFALYYCQQYDSSPF |
| | | | TFGPGTKVDIK |
| 1335 | ATX-P-3472 | VL aa | DIVMTQSPDSLAVSLGERATINCKSSQSVLYSSNNKNYLAWYQQKP |
| | | | GQPPKLLIYWASTRESGVPDRFSGSGSGTDFTLTISSLQAEDVAVYYC |
| | | | QQYYSTPYTFGQGTKLEIK |
| 1336 | ATX-P-3361 | VL aa | DIVMTQSPDSLAVSLGERATINCKSSQSVLYSSNNKNYLAWYQQKP |
| | | | GQPPKLLIYWASNRESGVPDRFSGSGSGTDFTLTISSLQAEDVAVYY |
| | | | CQQYYSTPYTFGQGTKLEIK |
| 1337 | ATX-P-3366 | VL aa | DIVMTQSPDSLAVSLGERATINCKSSQSVLYSSNNKNYLAWYQQKP |
| | | | GQPPKLLIYWASNRESGVPDRFSGSGSGTDFTLTISSLQAEDVAVYY |
| | | | CQQYYSTPYTFGQGTKLEIK |
| 1338 | ATX-P-3376 | VL aa | DIVMTQSPDSLAVSLGERATINCKSSQSVLYSSNNKNYLAWYQQKP |
| | | | GQPPKLLIYWASNRESGVPDRFSGSGSGTDFTLTISSLQAEDVAVYY |
| | | | CQQYYSTPYTFGQGTKLEIK |
| 1339 | ATX-P-3377 | VL aa | DIVMTQSPDSLAVSLGERATINCKSSQSVLYSSNNKNYLAWYQQKP |
| | | | GQPPELLIYWASNRESGVPDRFSGSGSGTDFTLTISSLQAEDVAVYY |
| | | | CQQYYSTPYTFGQGTKLEIK |
| 1340 | ATX-P-3418 | VL aa | DIQMTQSPSSLSASVGDRVTITCRASQTIRNFLNWYQRKPGKAPKILI |
| | | | YAASSLQSGVPSRFSGSGSGTDFTLTISSLQPADFATYYCQQTYSIPIT |
| | | | FGQGTRLEIK |
| 1341 | ATX-P-3420 | VL aa | DIQMTQSPSSLSASVGDRVTITCRASQSISRYLNWYQQKPGKAPKLL |
| | | | LYAASSLQSGVPSKFSGSGSGTDFTLTISSLQPEDFATYYCQQSYSSPI |
| | | | TFGQGTRLEIK |
| 1342 | ATX-P-3426 | VL aa | DIVMTQSPLSLPVTPGEPASISCRSSQSLLHSNGYNYLDWYLQKPGQS |
| | | | PQLLIYLGSNRASGVPDRFSGSGSGTDFTLKISRVEAEDVGVYYCMQ |
| | | | TLQTPPTFGQGTKVEIK |
| 1343 | ATX-P-3432 | VL aa | DIQLTQSPSFLSASVGDRLTITCRASQGISSYLAWYQQKPGKAPKLLI |
| | | | YTASTLQSGVPSRFSGSGSGTEFTLTISSLQPEDFATYYCQQLNGYPP |
| | | | TFGQGTKVEIK |
| 1344 | ATX-P-3433 | VL aa | DIQMTQSPSSLSASVGDRVTITCRASQSITSYLNWYQQKPGKAPKLLI |
| | | | FAASSLQSGVPSRFSGSGSGTDFTLTISSLQPEDFATYYCQQSYSTPLT |
| | | | FGGGTKVEIK |
| 1345 | ATX-P-3438 | VL aa | DIVMTQSPDSLAVSLGERATINCKSSQSVLYSSNNKNYLAWYQQKP |
| | | | GQPPKLLIYWASTRESGVPDRFSGSGSGTDFTLTISSLQAEDVAVYYC |
| | | | QQYYSTPRTFGQGTKVEIK |
| 1346 | ATX-P-3441 | VL aa | DIQMTQSPSSLSASVGERVTITCRASQSISSYLNWYQQKPGKAPNLLI |
| | | | YAASSFQSGVPSRVSGSGSGTDFTLTISSLQPEDFATYYCQQSYSNPY |
| | | | TFGQGTKLEIK |
| 1347 | ATX-P-3446 | VL aa | EIVLTQSPGTLSLSPGERATLSCRASQSVSRSYLAWYQQKPGQAPRL |
| | | | LIYGASSRATGIPDRFSGSGSGTDFTLTISRLEPEDFAVYYCQQYGSSP |
| | | | WTFGQGTKVEIK |
| 1348 | ATX-P-3452 | VL aa | DIVMTQSPLSLPVTPGEPASISCRSSQILLHTNGYNYLDWYLQKPGQS |
| | | | PQLLIYLGSYRASGVPDRFSGSGSGTDFTLKISRVEAGDVGLYYCMQ |
| | | | ALQTPLIFGGGTKVEIK |

TABLE 9
Anti-C3 antibodies (HC IgG1 Fc sequences)

| SEQ | Antibody | | |
|---|---|---|---|
| ID NO: | Name: | Descriptor: | Sequence: |
| 1349 | ATX-P-3360 | HC IgG1 Fc nt | CAGGTGCAGCTGCAGGAGTCGGGCCCAGGACTGGTGAAGCCT |
| | | | TCGGGGACCCTGTCCCTCACCTGCGCTGTCTCTGGTGGCTCCAT |
| | | | CAGCATTAATAACTGGTGGAGTTGGGTCCGCCAGCCCCCAGGG |
| | | | AAGGGGCTGGAGTGGCTTGGAAAAATCTATCATAGTGGGAAC |
| | | | ACCGACTACAACCCGTCCCTCAAGAGTCGAGTCACCATATCAG |
| | | | TAGACAAGTCCAAGAATCAGTTCTCCCTGAGGCTGAGTTCTGT |
| | | | GACCGCCGCGGACACGGCCGTATATTATTGTGCGAGCGGAAG |
| | | | CGATTACGATTTTTGGAGTGGTTATTTGGACTACTGGGGCCAG |
| | | | GGAACCCTGGTCACCGTCTCCTCAGCTAGCACTAAAGGGCCTT |
| | | | CTGTATTTCCCTTGGCCCCGTCCAGCAAATCGACCTCGGGAGG |
| | | | GACAGCCGCCCTGGGTTGCCTTGTGAAAGATTATTTCCCTGAG |
| | | | CCAGTTACCGTAAGTTGGAACAGTGGGGCGCTGACAAGTGGT |
| | | | GTGCACACGTTTCCTGCCGTCCTGCAATCATCGGGCTTGTATA |
| | | | GCCTCAGCTCTGTGGTCACTGTCCCAAGTTCATCGCTGGGCAC |
| | | | TCAGACGTATATTTGCAATGTGAACCACAAACCTTCAAATACA |
| | | | AAAGTGGATAAACGCGTAGAACCGAAATCGTGTGATAAAACT |
| | | | CACACATGCCCGCCATGCCCGGCACCTGAACTGCTTGGTGGTC |
| | | | CCAGCGTGTTCCTGTTCCCGCCGAAGCCTAAAGATACTCTAAT |
| | | | GATCAGCCGTACGCCAGAGGTGACATGTGTCGTGGTTGACGTG |
| | | | TCCCACGAAGATCCCGAAGTTAAGTTCAATTGGTATGTTGATG |
| | | | GTGTAGAGGTACACAATGCTAAGACTAAACCTCGCGAGGAGC |
| | | | AGTACGCCTCGACCTATCGTGTCGTGAGCGTTCTGACCGTCCT |
| | | | TCACCAAGATTGGCTTAACGGCAAAGAATATAAGTGCAAGGT |
| | | | AAGCAATAAAGCACTTCCGGCCCCAATCGAGAAAACCATTTCC |
| | | | AAGGCCAAAGGTCAACCAAGAGAACCCCAGGTGTATACTCTT |
| | | | CCGCCTTCTCGTGAGGAAATGACTAAAAATCAAGTATCCCTTA |
| | | | CGTGTCTGGTTAAAGGTTTTTATCCTAGCGATATTGCTGTTGAA |
| | | | TGGGAATCGAACGGTCAGCCGGAGAATAATTATAAAACAACG |
| | | | CCACCCGTCCTGGATAGCGACGGCTCATTTTTTCTGTATAGCA |
| | | | AACTGACTGTAGATAAATCACGGTGGCAGCAGGGCAATGTAT |
| | | | TCAGTTGCTCCGTTATGCATGAAGCGTTACATAATCACTACAC |
| | | | GCAGAAATCTCTTAGTCTTTCACCCGGT |
| 1350 | ATX-P-3362 | HC IgG1 Fc nt | GAAGTGCAGCTGGTGGAGTCTGGGGGAGGCTTGGTACAGCCT |
| | | | GGCAGGTCCCTGAGACTCTCCTGTGCAGCCTCTGGATTCACCT |
| | | | TTGATGATTATGCCATGCACTGGGTCCGGCAAGCTCCAGGGAA |
| | | | GGGCCTGGAGTGGGTCTCAGGTATTAGTTGGAATAGTGGTAGC |
| | | | ATAGCCTATGCGGACTCTGTGAAGGGCCGATTCACCATCTCCA |
| | | | GAGACAACGCCAAGAACTCCCTGTATCTGCAAATGAACAGTCT |
| | | | GAGAGTTGAGGACACGGCCTTTTTTTACTGTGCAAGAGTCGCA |
| | | | GCAGCAGCTGGTATCCCTTTCTTTGACTACTGGGGCCAGGGAA |
| | | | CCCTGGTCACCGTCTCCTCAGCTAGCACTAAAGGGCCTTCTGT |
| | | | ATTTCCCTTGGCCCCGTCCAGCAAATCGACCTCGGGAGGGACA |
| | | | GCCGCCCTGGGTTGCCTTGTGAAAGATTATTTCCCTGAGCCAG |
| | | | TTACCGTAAGTTGGAACAGTGGGGCGCTGACAAGTGGTGTGC |
| | | | ACACGTTTCCTGCCGTCCTGCAATCATCGGGCTTGTATAGCCTC |
| | | | AGCTCTGTGGTCACTGTCCCAAGTTCATCGCTGGGCACTCAGA |
| | | | CGTATATTTGCAATGTGAACCACAAACCTTCAAATACAAAAGT |
| | | | GGATAAACGCGTAGAACCGAAATCGTGTGATAAAACTCACAC |
| | | | ATGCCCGCCATGCCCGGCACCTGAACTGCTTGGTGGTCCCAGC |
| | | | GTGTTCCTGTTCCCGCCGAAGCCTAAAGATACTCTAATGATCA |
| | | | GCCGTACGCCAGAGGTGACATGTGTCGTGGTTGACGTGTCCCA |
| | | | CGAAGATCCCGAAGTTAAGTTCAATTGGTATGTTGATGGTGTA |
| | | | GAGGTACACAATGCTAAGACTAAACCTCGCGAGGAGCAGTAC |
| | | | GCCTCGACCTATCGTGTCGTGAGCGTTCTGACCGTCCTTCACC |
| | | | AAGATTGGCTTAACGGCAAAGAATATAAGTGCAAGGTAAGCA |
| | | | ATAAAGCACTTCCGGCCCCAATCGAGAAAACCATTTCCAAGGC |
| | | | CAAAGGTCAACCAAGAGAACCCCAGGTGTATACTCTTCCGCCT |
| | | | TCTCGTGAGGAAATGACTAAAAATCAAGTATCCCTTACGTGTC |
| | | | TGGTTAAAGGTTTTTATCCTAGCGATATTGCTGTTGAATGGGA |
| | | | ATCGAACGGTCAGCCGGAGAATAATTATAAAACAACGCCACC |
| | | | CGTCCTGGATAGCGACGGCTCATTTTTTCTGTATAGCAAACTG |
| | | | ACTGTAGATAAATCACGGTGGCAGCAGGGCAATGTATTCAGTT |
| | | | GCTCCGTTATGCATGAAGCGTTACATAATCACTACACGCAGAA |
| | | | ATCTCTTAGTCTTTCACCCGGT |
| 1351 | ATX-P-3363 | HC IgG1 Fc nt | CAGGTGCAGCTGCAGGAGTCGGGCCCAGGACTGGTGAAGCCT |
| | | | TCTGGGACCCTGACCCTCACCTGCGCTGTCTCTGGTGGCTCCAT |
| | | | CAACAGGGATAACTGGTGGAGTTGGGTCCGCCAGCCCCCGGG |
| | | | GAAGGGGCTGGAGTGGATTGGACAAATCTATCAGAGTGGGAG |
| | | | CACCAACTACAACCCGTCCCTCAAGAGTCGGGTCACCATATCA |
| | | | GTCGACAAGTCCAAGAACCAGTTCTCCCTGAAGCTGAGTTCTG |
| | | | TGACCGCCGCGGACACGGCCGTATATTACTGTGCGAGAGTATA |
| | | | TGACTGGAACTACGGGGGTCACTTTGACTACTGGGGCCAGGG |
| | | | AACCCTGGTCACCGTCTCCTCAGCTAGCACTAAAGGGCCTTCT |
| | | | GTATTTCCCTTGGCCCCGTCCAGCAAATCGACCTCGGGAGGGA |
| | | | CAGCCGCCCTGGGTTGCCTTGTGAAAGATTATTTCCCTGAGCC |
| | | | AGTTACCGTAAGTTGGAACAGTGGGGCGCTGACAAGTGGTGT |
| | | | GCACACGTTTCCTGCCGTCCTGCAATCATCGGGCTTGTATAGC |
| | | | CTCAGCTCTGTGGTCACTGTCCCAAGTTCATCGCTGGGCACTC |
| | | | AGACGTATATTTGCAATGTGAACCACAAACCTTCAAATACAAA |
| | | | AGTGGATAAACGCGTAGAACCGAAATCGTGTGATAAAACTCA |
| | | | CACATGCCCGCCATGCCCGGCACCTGAACTGCTTGGTGGTCCC |
| | | | AGCGTGTTCCTGTTCCCGCCGAAGCCTAAAGATACTCTAATGA |
| | | | TCAGCCGTACGCCAGAGGTGACATGTGTCGTGGTTGACGTGTC |
| | | | CCACGAAGATCCCGAAGTTAAGTTCAATTGGTATGTTGATGGT |
| | | | GTAGAGGTACACAATGCTAAGACTAAACCTCGCGAGGAGCAG |
| | | | TACGCCTCGACCTATCGTGTCGTGAGCGTTCTGACCGTCCTTCA |
| | | | CCAAGATTGGCTTAACGGCAAAGAATATAAGTGCAAGGTAAG |
| | | | CAATAAAGCACTTCCGGCCCCAATCGAGAAAACCATTTCCAAG |
| | | | GCCAAAGGTCAACCAAGAGAACCCCAGGTGTATACTCTTCCGC |
| | | | CTTCTCGTGAGGAAATGACTAAAAATCAAGTATCCCTTACGTG |
| | | | TCTGGTTAAAGGTTTTTATCCTAGCGATATTGCTGTTGAATGGG |
| | | | AATCGAACGGTCAGCCGGAGAATAATTATAAAACAACGCCAC |
| | | | CCGTCCTGGATAGCGACGGCTCATTTTTTCTGTATAGCAAACT |
| | | | GACTGTAGATAAATCACGGTGGCAGCAGGGCAATGTATTCAG |
| | | | TTGCTCCGTTATGCATGAAGCGTTACATAATCACTACACGCAG |
| | | | AAATCTCTTAGTCTTTCACCCGGT |
| 1352 | ATX-P-3365 | HC IgG1 Fc nt | CAGGTGCAGCTGCAGGAGTCGGGCCCAGGACTGGTGAAGCCT |
| | | | TCGGGGACCCTGTCCCTCACCTGCGCTGTCTCTGGTGACTCCAT |
| | | | CAGCAGTAATAACTGGTGGAGTTGGGTCCGCCAGCCCCCAGG |
| | | | GAAGGGGCTGGAGTGGATTGGACAAATCTATCATAGTGGCCA |
| | | | CACCAACTACAACCCGTCCCTCAAGAGTCGAGTCACCATATCG |
| | | | GTTGACATGTCCAAGAACCAGTTCTCCCTGAAGCTGACCTCTG |
| | | | TGACCGCCGCGGACACGGCCGTGTATTACTGTGCGAGGGGGG |
| | | | CTACAGAAATTCTGGGGTACTTCGATCTCTGGGGCCGTGGCAC |
| | | | CCTGGTCACTGTCTCCTCAGCTAGCACTAAAGGGCCTTCTGTA |
| | | | TTTCCCTTGGCCCCGTCCAGCAAATCGACCTCGGGAGGGACAG |
| | | | CCGCCCTGGGTTGCCTTGTGAAAGATTATTTCCCTGAGCCAGT |
| | | | TACCGTAAGTTGGAACAGTGGGGCGCTGACAAGTGGTGTGCA |
| | | | CACGTTTCCTGCCGTCCTGCAATCATCGGGCTTGTATAGCCTCA |
| | | | GCTCTGTGGTCACTGTCCCAAGTTCATCGCTGGGCACTCAGAC |
| | | | GTATATTTGCAATGTGAACCACAAACCTTCAAATACAAAAGTG |
| | | | GATAAACGCGTAGAACCGAAATCGTGTGATAAAACTCACACA |
| | | | TGCCCGCCATGCCCGGCACCTGAACTGCTTGGTGGTCCCAGCG |
| | | | TGTTCCTGTTCCCGCCGAAGCCTAAAGATACTCTAATGATCAG |
| | | | CCGTACGCCAGAGGTGACATGTGTCGTGGTTGACGTGTCCCAC |
| | | | GAAGATCCCGAAGTTAAGTTCAATTGGTATGTTGATGGTGTAG |
| | | | AGGTACACAATGCTAAGACTAAACCTCGCGAGGAGCAGTACG |
| | | | CCTCGACCTATCGTGTCGTGAGCGTTCTGACCGTCCTTCACCA |
| | | | AGATTGGCTTAACGGCAAAGAATATAAGTGCAAGGTAAGCAA |
| | | | TAAAGCACTTCCGGCCCCAATCGAGAAAACCATTTCCAAGGCC |
| | | | AAAGGTCAACCAAGAGAACCCCAGGTGTATACTCTTCCGCCTT |
| | | | CTCGTGAGGAAATGACTAAAAATCAAGTATCCCTTACGTGTCT |
| | | | GGTTAAAGGTTTTTATCCTAGCGATATTGCTGTTGAATGGGAA |
| | | | TCGAACGGTCAGCCGGAGAATAATTATAAAACAACGCCACCC |
| | | | GTCCTGGATAGCGACGGCTCATTTTTTCTGTATAGCAAACTGA |
| | | | CTGTAGATAAATCACGGTGGCAGCAGGGCAATGTATTCAGTTG |
| | | | CTCCGTTATGCATGAAGCGTTACATAATCACTACACGCAGAAA |
| | | | TCTCTTAGTCTTTCACCCGGT |
| 1353 | ATX-P-3367 | HC IgG1 Fc nt | CAGGTGCAGCTGCAGGAGTCGGGCCCAGGACTGGTGAAGCCT |
| | | | TCGGAGACCCTGTCCCTCACCTGCACTGTCTCTGGTGGCTCCGT |
| | | | CAGCAGTGGTAGTTACTACTGGAGCTGGATCCGGCAGCCCCCA |
| | | | GGGAAGGGACTGGAGTGGATTGGATATATCTATAAAAGTGGG |
| | | | TTCACCAATTACAACCCCTCCCTCAAGAGTCGAGTCACCATAT |
| | | | CAGTAGACACGTCCAAGAACCAGTTCTCCCTGAAGCTGAGCTC |
| | | | TGTGACCGCTGCGGACACGGCCGTGTATTACTGTGCGATAGGG |
| | | | GGACGTGGATACAGCTATGGTCCTTTTGACTACTGGGGCCAGG |
| | | | GAACCCTGGTCACCGTCTCCTCAGCTAGCACTAAAGGGCCTTC |
| | | | TGTATTTCCCTTGGCCCCGTCCAGCAAATCGACCTCGGGAGGG |
| | | | ACAGCCGCCCTGGGTTGCCTTGTGAAAGATTATTTCCCTGAGC |
| | | | CAGTTACCGTAAGTTGGAACAGTGGGGCGCTGACAAGTGGTG |
| | | | TGCACACGTTTCCTGCCGTCCTGCAATCATCGGGCTTGTATAG |
| | | | CCTCAGCTCTGTGGTCACTGTCCCAAGTTCATCGCTGGGCACT |
| | | | CAGACGTATATTTGCAATGTGAACCACAAACCTTCAAATACAA |
| | | | AAGTGGATAAACGCGTAGAACCGAAATCGTGTGATAAAACTC |
| | | | ACACATGCCCGCCATGCCCGGCACCTGAACTGCTTGGTGGTCC |
| | | | CAGCGTGTTCCTGTTCCCGCCGAAGCCTAAAGATACTCTAATG |
| | | | ATCAGCCGTACGCCAGAGGTGACATGTGTCGTGGTTGACGTGT |
| | | | CCCACGAAGATCCCGAAGTTAAGTTCAATTGGTATGTTGATGG |
| | | | TGTAGAGGTACACAATGCTAAGACTAAACCTCGCGAGGAGCA |
| | | | GTACGCCTCGACCTATCGTGTCGTGAGCGTTCTGACCGTCCTTC |
| | | | ACCAAGATTGGCTTAACGGCAAAGAATATAAGTGCAAGGTAA |
| | | | GCAATAAAGCACTTCCGGCCCCAATCGAGAAAACCATTTCCAA |
| | | | GGCCAAAGGTCAACCAAGAGAACCCCAGGTGTATACTCTTCC |
| | | | GCCTTCTCGTGAGGAAATGACTAAAAATCAAGTATCCCTTACG |
| | | | TGTCTGGTTAAAGGTTTTTATCCTAGCGATATTGCTGTTGAATG |
| | | | GGAATCGAACGGTCAGCCGGAGAATAATTATAAAACAACGCC |
| | | | ACCCGTCCTGGATAGCGACGGCTCATTTTTTCTGTATAGCAAA |
| | | | CTGACTGTAGATAAATCACGGTGGCAGCAGGGCAATGTATTCA |
| | | | GTTGCTCCGTTATGCATGAAGCGTTACATAATCACTACACGCA |
| | | | GAAATCTCTTAGTCTTTCACCCGGT |
| 1354 | ATX-P-3369 | HC IgG1 Fc nt | CAGGTGCAGCTGGTGCAGTCTGGGGCTGAGGTGAAGAAGCCT |
| | | | GGGGCCTCAGTGAAGGTCTCCTGCAAGGCTTCTGGATACACCT |
| | | | TCACCGGCTACTATTTACACTGGGTGCGACAGGCCCCTGGACA |
| | | | AGGACTTGAGTGGATGGGATGGATCAACCCTAACAGTGGTGA |
| | | | CACAAACTATGTACAGAACTTTCAGGGCAGGGTCACCATGACC |
| | | | AGGGACACGTCCATCAGCACAGCCTACATGGAGCTGAGCAGG |
| | | | CTGAGATCTGACGACACGGCCGTGTATTACTGTGCGAGATCCT |
| | | | ACGTGGATACCAGCTCGTCGGCTTTTGATATCTGGGGACAAGG |
| | | | GACAATGGTCACCGTCTCTTCAGCTAGCACTAAAGGGCCTTCT |
| | | | GTATTTCCCTTGGCCCCGTCCAGCAAATCGACCTCGGGAGGGA |
| | | | CAGCCGCCCTGGGTTGCCTTGTGAAAGATTATTTCCCTGAGCC |
| | | | AGTTACCGTAAGTTGGAACAGTGGGGCGCTGACAAGTGGTGT |
| | | | GCACACGTTTCCTGCCGTCCTGCAATCATCGGGCTTGTATAGC |
| | | | CTCAGCTCTGTGGTCACTGTCCCAAGTTCATCGCTGGGCACTC |
| | | | AGACGTATATTTGCAATGTGAACCACAAACCTTCAAATACAAA |
| | | | AGTGGATAAACGCGTAGAACCGAAATCGTGTGATAAAACTCA |
| | | | CACATGCCCGCCATGCCCGGCACCTGAACTGCTTGGTGGTCCC |
| | | | AGCGTGTTCCTGTTCCCGCCGAAGCCTAAAGATACTCTAATGA |
| | | | TCAGCCGTACGCCAGAGGTGACATGTGTCGTGGTTGACGTGTC |
| | | | CCACGAAGATCCCGAAGTTAAGTTCAATTGGTATGTTGATGGT |
| | | | GTAGAGGTACACAATGCTAAGACTAAACCTCGCGAGGAGCAG |
| | | | TACGCCTCGACCTATCGTGTCGTGAGCGTTCTGACCGTCCTTCA |
| | | | CCAAGATTGGCTTAACGGCAAAGAATATAAGTGCAAGGTAAG |
| | | | CAATAAAGCACTTCCGGCCCCAATCGAGAAAACCATTTCCAAG |
| | | | GCCAAAGGTCAACCAAGAGAACCCCAGGTGTATACTCTTCCGC |
| | | | CTTCTCGTGAGGAAATGACTAAAAATCAAGTATCCCTTACGTG |
| | | | TCTGGTTAAAGGTTTTTATCCTAGCGATATTGCTGTTGAATGGG |
| | | | AATCGAACGGTCAGCCGGAGAATAATTATAAAACAACGCCAC |
| | | | CCGTCCTGGATAGCGACGGCTCATTTTTTCTGTATAGCAAACT |
| | | | GACTGTAGATAAATCACGGTGGCAGCAGGGCAATGTATTCAG |
| | | | TTGCTCCGTTATGCATGAAGCGTTACATAATCACTACACGCAG |
| | | | AAATCTCTTAGTCTTTCACCCGGT |
| 1355 | ATX-P-3370 | HC IgG1 Fc nt | CAGGTGCAGCTGCAGGAGTCGGGCCCAGGACTGGTGAAGCCT |
| | | | TCGGAGACCCTGTCCCTCACCTGCACTGTCTCTGGTGGCTCCAT |
| | | | CAGTAGTTACTACTGGAGCTGGATCCGGCAGCCCCCCGGGAA |
| | | | GGGACTGGAGTGGATTGGGTATGTCTATTACAGTGGGTACACC |
| | | | AAGTACAACCCCTCCCTCAAGAGTCGAGTCACCATATCAGTAG |
| | | | ACACGCCCAAGACCCAGTTCTCCCTGAAGATGAGCTCTGTGAC |
| | | | CGCTGCGGACACGGCCGTGTATTACTGTGCGAGCGTCGAATCA |
| | | | AAGTGGAACTACGGGCCTTTTGATATCTGGGGACAAGGGACA |
| | | | ATGGTCACCGTCTCTTCAGCTAGCACTAAAGGGCCTTCTGTAT |
| | | | TTCCCTTGGCCCCGTCCAGCAAATCGACCTCGGGAGGGACAGC |
| | | | CGCCCTGGGTTGCCTTGTGAAAGATTATTTCCCTGAGCCAGTT |
| | | | ACCGTAAGTTGGAACAGTGGGGCGCTGACAAGTGGTGTGCAC |
| | | | ACGTTTCCTGCCGTCCTGCAATCATCGGGCTTGTATAGCCTCA |
| | | | GCTCTGTGGTCACTGTCCCAAGTTCATCGCTGGGCACTCAGAC |
| | | | GTATATTTGCAATGTGAACCACAAACCTTCAAATACAAAAGTG |
| | | | GATAAACGCGTAGAACCGAAATCGTGTGATAAAACTCACACA |
| | | | TGCCCGCCATGCCCGGCACCTGAACTGCTTGGTGGTCCCAGCG |
| | | | TGTTCCTGTTCCCGCCGAAGCCTAAAGATACTCTAATGATCAG |
| | | | CCGTACGCCAGAGGTGACATGTGTCGTGGTTGACGTGTCCCAC |
| | | | GAAGATCCCGAAGTTAAGTTCAATTGGTATGTTGATGGTGTAG |
| | | | AGGTACACAATGCTAAGACTAAACCTCGCGAGGAGCAGTACG |
| | | | CCTCGACCTATCGTGTCGTGAGCGTTCTGACCGTCCTTCACCA |
| | | | AGATTGGCTTAACGGCAAAGAATATAAGTGCAAGGTAAGCAA |
| | | | TAAAGCACTTCCGGCCCCAATCGAGAAAACCATTTCCAAGGCC |
| | | | AAAGGTCAACCAAGAGAACCCCAGGTGTATACTCTTCCGCCTT |
| | | | CTCGTGAGGAAATGACTAAAAATCAAGTATCCCTTACGTGTCT |
| | | | GGTTAAAGGTTTTTATCCTAGCGATATTGCTGTTGAATGGGAA |
| | | | TCGAACGGTCAGCCGGAGAATAATTATAAAACAACGCCACCC |
| | | | GTCCTGGATAGCGACGGCTCATTTTTTCTGTATAGCAAACTGA |
| | | | CTGTAGATAAATCACGGTGGCAGCAGGGCAATGTATTCAGTTG |
| | | | CTCCGTTATGCATGAAGCGTTACATAATCACTACACGCAGAAA |
| | | | TCTCTTAGTCTTTCACCCGGT |
| 1356 | ATX-P-3371 | HC IgG1 Fc nt | CAGGTGCAGCTGCAGGAGTCGGGCCCAGGACTGGTGAAGCCT |
| | | | TCGGAGACCCTGTCCCTCACCTGCACTGTCTCTGGTGACTCCAT |
| | | | CAGTAGTTACTACTGGAGCTGGATCCGGCAGCCCCCAGGGAA |
| | | | GGGACTGGAGTGGATTGGATATATCTATTACAGTGGGTTCACC |
| | | | AAGTACAACCCCTCCCTCAACAGTCGAGTCACCATATCAGTAG |
| | | | ACACGTCCAAGAGCCAGTTCTCCCTGAAGCTGACCTCTGTGAC |
| | | | CGCTGCGGACACGGCCGTGTATTACTGTGCGATGAGAGAGCC |
| | | | GAGAGGCCGGTATAACTGGAACTACGGGCCTTTTGATATCTGG |
| | | | GGACAAGGGACAATGGTCACCGTCTCTTCAGCTAGCACTAAA |
| | | | GGGCCTTCTGTATTTCCCTTGGCCCCGTCCAGCAAATCGACCTC |
| | | | GGGAGGGACAGCCGCCCTGGGTTGCCTTGTGAAAGATTATTTC |
| | | | CCTGAGCCAGTTACCGTAAGTTGGAACAGTGGGGCGCTGACA |
| | | | AGTGGTGTGCACACGTTTCCTGCCGTCCTGCAATCATCGGGCT |
| | | | TGTATAGCCTCAGCTCTGTGGTCACTGTCCCAAGTTCATCGCTG |
| | | | GGCACTCAGACGTATATTTGCAATGTGAACCACAAACCTTCAA |
| | | | ATACAAAAGTGGATAAACGCGTAGAACCGAAATCGTGTGATA |
| | | | AAACTCACACATGCCCGCCATGCCCGGCACCTGAACTGCTTGG |
| | | | TGGTCCCAGCGTGTTCCTGTTCCCGCCGAAGCCTAAAGATACT |
| | | | CTAATGATCAGCCGTACGCCAGAGGTGACATGTGTCGTGGTTG |
| | | | ACGTGTCCCACGAAGATCCCGAAGTTAAGTTCAATTGGTATGT |
| | | | TGATGGTGTAGAGGTACACAATGCTAAGACTAAACCTCGCGA |
| | | | GGAGCAGTACGCCTCGACCTATCGTGTCGTGAGCGTTCTGACC |
| | | | GTCCTTCACCAAGATTGGCTTAACGGCAAAGAATATAAGTGCA |
| | | | AGGTAAGCAATAAAGCACTTCCGGCCCCAATCGAGAAAACCA |
| | | | TTTCCAAGGCCAAAGGTCAACCAAGAGAACCCCAGGTGTATA |
| | | | CTCTTCCGCCTTCTCGTGAGGAAATGACTAAAAATCAAGTATC |
| | | | CCTTACGTGTCTGGTTAAAGGTTTTTATCCTAGCGATATTGCTG |
| | | | TTGAATGGGAATCGAACGGTCAGCCGGAGAATAATTATAAAA |
| | | | CAACGCCACCCGTCCTGGATAGCGACGGCTCATTTTTTCTGTA |
| | | | TAGCAAACTGACTGTAGATAAATCACGGTGGCAGCAGGGCAA |
| | | | TGTATTCAGTTGCTCCGTTATGCATGAAGCGTTACATAATCACT |
| | | | ACACGCAGAAATCTCTTAGTCTTTCACCCGGT |
| 1357 | ATX-P-3373 | HC IgG1 Fc nt | CAGGTGCAGCTGCAGGAGTCGGGCCCAGGACTGGTGAAGCCT |
| | | | TCGGGGACCCTGTCCCTCACCTGCGCTGTCTCTGGTGGCTCCAT |
| | | | CAGTAATGATAACTGGTGGAGTTGGGTCCGCCAGCCCCCCGGG |
| | | | AAGGGACTGGAGTGGATTGGGAAAATCTATCATAGTGAGTTC |
| | | | ACCAACTACAACCCGTCCCTCAAGAGTCGAGTCACCATATCAG |
| | | | TAGACAAGTCCAAGAACCAGTTCTCCCTGGAGCTGAACTCTGT |
| | | | GACCGCCGCGGACACGGCCGTGTATTACTGTGCGAGAGAGTA |
| | | | TCATAATTTCATGGACGTCTGGTGCAAAGGGACCACGGTCACC |
| | | | GTCTCCTCAGCTAGCACTAAAGGGCCTTCTGTATTTCCCTTGGC |
| | | | CCCGTCCAGCAAATCGACCTCGGGAGGGACAGCCGCCCTGGG |
| | | | TTGCCTTGTGAAAGATTATTTCCCTGAGCCAGTTACCGTAAGTT |
| | | | GGAACAGTGGGGCGCTGACAAGTGGTGTGCACACGTTTCCTGC |
| | | | CGTCCTGCAATCATCGGGCTTGTATAGCCTCAGCTCTGTGGTC |
| | | | ACTGTCCCAAGTTCATCGCTGGGCACTCAGACGTATATTTGCA |
| | | | ATGTGAACCACAAACCTTCAAATACAAAAGTGGATAAACGCG |
| | | | TAGAACCGAAATCGTGTGATAAAACTCACACATGCCCGCCATG |
| | | | CCCGGCACCTGAACTGCTTGGTGGTCCCAGCGTGTTCCTGTTC |
| | | | CCGCCGAAGCCTAAAGATACTCTAATGATCAGCCGTACGCCAG |
| | | | AGGTGACATGTGTCGTGGTTGACGTGTCCCACGAAGATCCCGA |
| | | | AGTTAAGTTCAATTGGTATGTTGATGGTGTAGAGGTACACAAT |
| | | | GCTAAGACTAAACCTCGCGAGGAGCAGTACGCCTCGACCTATC |
| | | | GTGTCGTGAGCGTTCTGACCGTCCTTCACCAAGATTGGCTTAA |
| | | | CGGCAAAGAATATAAGTGCAAGGTAAGCAATAAAGCACTTCC |
| | | | GGCCCCAATCGAGAAAACCATTTCCAAGGCCAAAGGTCAACC |
| | | | AAGAGAACCCCAGGTGTATACTCTTCCGCCTTCTCGTGAGGAA |
| | | | ATGACTAAAAATCAAGTATCCCTTACGTGTCTGGTTAAAGGTT |
| | | | TTTATCCTAGCGATATTGCTGTTGAATGGGAATCGAACGGTCA |
| | | | GCCGGAGAATAATTATAAAACAACGCCACCCGTCCTGGATAG |
| | | | CGACGGCTCATTTTTTCTGTATAGCAAACTGACTGTAGATAAA |
| | | | TCACGGTGGCAGCAGGGCAATGTATTCAGTTGCTCCGTTATGC |
| | | | ATGAAGCGTTACATAATCACTACACGCAGAAATCTCTTAGTCT |
| | | | TTCACCCGGT |
| 1358 | ATX-P-3375 | HC IgG1 Fc nt | CAGGTGCAGCTGCAGGAGTCGGGCCCAGGACTGGTGAAGCCT |
| | | | TCGGAGACCCTGTCCCTCACCTGCACTGTCTCTGGTGACTCCGT |
| | | | CAGCAGTGGTAAATACTTCTGGAGCTGGATCCGGCAGTCCCCA |
| | | | GGGAAGGGACTGGAGTGGATTGGGTATATCTATTACAGTGGG |
| | | | AGCACCAACTACAACCCCTCCCTCAAGAATCGAGTCACCATAT |
| | | | CGGTAGACACGTCCAAGAAGGAGTTGTCTCTGAAGCTGAGTTC |
| | | | TGTGACCGCTGCGGACACGGCCGTTTATTACTGTGCGAGAGGA |
| | | | GGGCATAACTGGAACTACGCTGCTTTTGATATCTGGGGACAAG |
| | | | GGACAATGGTCACCGTCTCTTCAGCTAGCACTAAAGGGCCTTC |
| | | | TGTATTTCCCTTGGCCCCGTCCAGCAAATCGACCTCGGGAGGG |
| | | | ACAGCCGCCCTGGGTTGCCTTGTGAAAGATTATTTCCCTGAGC |
| | | | CAGTTACCGTAAGTTGGAACAGTGGGGCGCTGACAAGTGGTG |
| | | | TGCACACGTTTCCTGCCGTCCTGCAATCATCGGGCTTGTATAG |
| | | | CCTCAGCTCTGTGGTCACTGTCCCAAGTTCATCGCTGGGCACT |
| | | | CAGACGTATATTTGCAATGTGAACCACAAACCTTCAAATACAA |
| | | | AAGTGGATAAACGCGTAGAACCGAAATCGTGTGATAAAACTC |
| | | | ACACATGCCCGCCATGCCCGGCACCTGAACTGCTTGGTGGTCC |
| | | | CAGCGTGTTCCTGTTCCCGCCGAAGCCTAAAGATACTCTAATG |
| | | | ATCAGCCGTACGCCAGAGGTGACATGTGTCGTGGTTGACGTGT |
| | | | CCCACGAAGATCCCGAAGTTAAGTTCAATTGGTATGTTGATGG |
| | | | TGTAGAGGTACACAATGCTAAGACTAAACCTCGCGAGGAGCA |
| | | | GTACGCCTCGACCTATCGTGTCGTGAGCGTTCTGACCGTCCTTC |
| | | | ACCAAGATTGGCTTAACGGCAAAGAATATAAGTGCAAGGTAA |
| | | | GCAATAAAGCACTTCCGGCCCCAATCGAGAAAACCATTTCCAA |
| | | | GGCCAAAGGTCAACCAAGAGAACCCCAGGTGTATACTCTTCC |
| | | | GCCTTCTCGTGAGGAAATGACTAAAAATCAAGTATCCCTTACG |
| | | | TGTCTGGTTAAAGGTTTTTATCCTAGCGATATTGCTGTTGAATG |
| | | | GGAATCGAACGGTCAGCCGGAGAATAATTATAAAACAACGCC |
| | | | ACCCGTCCTGGATAGCGACGGCTCATTTTTTCTGTATAGCAAA |
| | | | CTGACTGTAGATAAATCACGGTGGCAGCAGGGCAATGTATTCA |
| | | | GTTGCTCCGTTATGCATGAAGCGTTACATAATCACTACACGCA |
| | | | GAAATCTCTTAGTCTTTCACCCGGT |
| 1359 | ATX-P-3378 | HC IgG1 Fc nt | CAGGTGCAGCTGCAGGAGTCGGGCCCAGGACTGGTGAAGCCT |
| | | | TCGGGGACCCTGTCCCTCACCTGCGCTGTCTCTGGTGGCTCCAT |
| | | | CAGTAATGATAACTGGTGGAGTTGGGTCCGCCAGTCCCCCGGG |
| | | | AAGGGGTTGGAGTGGATTGGGAAAATCTATCATAGTGAGTTC |
| | | | ACCAACTACAACCCGTCCCTCAAGAGTCGAGTCACCATATCAG |
| | | | TAGACAAGTCCAAGAACCAGTTCTCCCTGGAGCTGAGCTCTGT |
| | | | GGCCGCCGCGGACACGGCCGTGTATTACTGTGCGAGAGAGTA |
| | | | TGAGAACTTCATGGACGTCTGGGGCAAGGGGACCACGGTCAC |
| | | | CGTCTCCTCAGCTAGCACTAAAGGGCCTTCTGTATTTCCCTTGG |
| | | | CCCCGTCCAGCAAATCGACCTCGGGAGGGACAGCCGCCCTGG |
| | | | GTTGCCTTGTGAAAGATTATTTCCCTGAGCCAGTTACCGTAAG |
| | | | TTGGAACAGTGGGGCGCTGACAAGTGGTGTGCACACGTTTCCT |
| | | | GCCGTCCTGCAATCATCGGGCTTGTATAGCCTCAGCTCTGTGG |
| | | | TCACTGTCCCAAGTTCATCGCTGGGCACTCAGACGTATATTTG |
| | | | CAATGTGAACCACAAACCTTCAAATACAAAAGTGGATAAACG |
| | | | CGTAGAACCGAAATCGTGTGATAAAACTCACACATGCCCGCC |
| | | | ATGCCCGGCACCTGAACTGCTTGGTGGTCCCAGCGTGTTCCTG |
| | | | TTCCCGCCGAAGCCTAAAGATACTCTAATGATCAGCCGTACGC |
| | | | CAGAGGTGACATGTGTCGTGGTTGACGTGTCCCACGAAGATCC |
| | | | CGAAGTTAAGTTCAATTGGTATGTTGATGGTGTAGAGGTACAC |
| | | | AATGCTAAGACTAAACCTCGCGAGGAGCAGTACGCCTCGACC |
| | | | TATCGTGTCGTGAGCGTTCTGACCGTCCTTCACCAAGATTGGC |
| | | | TTAACGGCAAAGAATATAAGTGCAAGGTAAGCAATAAAGCAC |
| | | | TTCCGGCCCCAATCGAGAAAACCATTTCCAAGGCCAAAGGTCA |
| | | | ACCAAGAGAACCCCAGGTGTATACTCTTCCGCCTTCTCGTGAG |
| | | | GAAATGACTAAAAATCAAGTATCCCTTACGTGTCTGGTTAAAG |
| | | | GTTTTTATCCTAGCGATATTGCTGTTGAATGGGAATCGAACGG |
| | | | TCAGCCGGAGAATAATTATAAAACAACGCCACCCGTCCTGGAT |
| | | | AGCGACGGCTCATTTTTTCTGTATAGCAAACTGACTGTAGATA |
| | | | AATCACGGTGGCAGCAGGGCAATGTATTCAGTTGCTCCGTTAT |
| | | | GCATGAAGCGTTACATAATCACTACACGCAGAAATCTCTTAGT |
| | | | CTTTCACCCGGT |
| 1360 | ATX-P-3382 | HC IgG1 Fc nt | CAGGTGCAGCTGCAGGAGTCGGGCCCAGGACTGGTGAAGCCT |
| | | | TCGGGGACCCTGTCCCTCACCTGCGCTGTCTCTGGTGACTCCAT |
| | | | CAGCAGTAATAGCTGGTGGAATTGGGTCCGCCAGCCCCCAGG |
| | | | GAAGGGGCTGGAGTGGATTGGGCAAATCTTTCATAGTGGACA |
| | | | CACCAACTACAACCCGTCCCTCAAGAGTCGAGTCACCATGTCT |
| | | | ATAGACAAGTCCAAGAACCAGTTCTCCCTGAAACTGACCTCTG |
| | | | TGACCGCCGCGGACACGGCCCTGTATTACTGTGCGAGAGGAG |
| | | | GGGAGTATGAAAACTCGGCGAACTGGTTCGACCCCTGGGGCC |
| | | | AAGGAACCCTGGTCACCGTCTCTTCAGCTAGCACTAAAGGGCC |
| | | | TTCTGTATTTCCCTTGGCCCCGTCCAGCAAATCGACCTCGGGA |
| | | | GGGACAGCCGCCCTGGGTTGCCTTGTGAAAGATTATTTCCCTG |
| | | | AGCCAGTTACCGTAAGTTGGAACAGTGGGGCGCTGACAAGTG |
| | | | GTGTGCACACGTTTCCTGCCGTCCTGCAATCATCGGGCTTGTAT |
| | | | AGCCTCAGCTCTGTGGTCACTGTCCCAAGTTCATCGCTGGGCA |
| | | | CTCAGACGTATATTTGCAATGTGAACCACAAACCTTCAAATAC |
| | | | AAAAGTGGATAAACGCGTAGAACCGAAATCGTGTGATAAAAC |
| | | | TCACACATGCCCGCCATGCCCGGCACCTGAACTGCTTGGTGGT |
| | | | CCCAGCGTGTTCCTGTTCCCGCCGAAGCCTAAAGATACTCTAA |
| | | | TGATCAGCCGTACGCCAGAGGTGACATGTGTCGTGGTTGACGT |
| | | | GTCCCACGAAGATCCCGAAGTTAAGTTCAATTGGTATGTTGAT |
| | | | GGTGTAGAGGTACACAATGCTAAGACTAAACCTCGCGAGGAG |
| | | | CAGTACGCCTCGACCTATCGTGTCGTGAGCGTTCTGACCGTCC |
| | | | TTCACCAAGATTGGCTTAACGGCAAAGAATATAAGTGCAAGG |
| | | | TAAGCAATAAAGCACTTCCGGCCCCAATCGAGAAAACCATTTC |
| | | | CAAGGCCAAAGGTCAACCAAGAGAACCCCAGGTGTATACTCT |
| | | | TCCGCCTTCTCGTGAGGAAATGACTAAAAATCAAGTATCCCTT |
| | | | ACGTGTCTGGTTAAAGGTTTTTATCCTAGCGATATTGCTGTTGA |
| | | | ATGGGAATCGAACGGTCAGCCGGAGAATAATTATAAAACAAC |
| | | | GCCACCCGTCCTGGATAGCGACGGCTCATTTTTTCTGTATAGC |
| | | | AAACTGACTGTAGATAAATCACGGTGGCAGCAGGGCAATGTA |
| | | | TTCAGTTGCTCCGTTATGCATGAAGCGTTACATAATCACTACA |
| | | | CGCAGAAATCTCTTAGTCTTTCACCCGGT |
| 1361 | ATX-P-3383 | HC IgG1 Fc nt | CAGGTGCAGCTGCAGGAGTCGGGCCCAGGACTGGTGAAGCCT |
| | | | TCGGGGACCCTGTCCCTCACCTGCGCTGTCTCTGGTGTCTCCAT |
| | | | CAACAAGGATAACTGGTGGACTTGGGTCCGCCAGCCCCCAGG |
| | | | GAAGGGGCTGGAGTGGATTGGGAAAATCTATCATAGTGGGAG |
| | | | CACCAACTACAACCCGTCCCTCAAGAGTCGAGTCACCATATCA |
| | | | GTAGACAACTCCAAGAACCAATTCTCCCTGAAGCTGAACTCTG |
| | | | TGACCGCCGCGGACACGGCCGTGTATTACTGTACGAGAGGGG |
| | | | GGGATATAGCTATGGAGGGGGACTGGTTCGCCCCCTGGGGCC |
| | | | AGGGAACCCTGGTCACCGTCTCCTCAGCTAGCACTAAAGGGCC |
| | | | TTCTGTATTTCCCTTGGCCCCGTCCAGCAAATCGACCTCGGGA |
| | | | GGGACAGCCGCCCTGGGTTGCCTTGTGAAAGATTATTTCCCTG |
| | | | AGCCAGTTACCGTAAGTTGGAACAGTGGGGCGCTGACAAGTG |
| | | | GTGTGCACACGTTTCCTGCCGTCCTGCAATCATCGGGCTTGTAT |
| | | | AGCCTCAGCTCTGTGGTCACTGTCCCAAGTTCATCGCTGGGCA |
| | | | CTCAGACGTATATTTGCAATGTGAACCACAAACCTTCAAATAC |
| | | | AAAAGTGGATAAACGCGTAGAACCGAAATCGTGTGATAAAAC |
| | | | TCACACATGCCCGCCATGCCCGGCACCTGAACTGCTTGGTGGT |
| | | | CCCAGCGTGTTCCTGTTCCCGCCGAAGCCTAAAGATACTCTAA |
| | | | TGATCAGCCGTACGCCAGAGGTGACATGTGTCGTGGTTGACGT |
| | | | GTCCCACGAAGATCCCGAAGTTAAGTTCAATTGGTATGTTGAT |
| | | | GGTGTAGAGGTACACAATGCTAAGACTAAACCTCGCGAGGAG |
| | | | CAGTACGCCTCGACCTATCGTGTCGTGAGCGTTCTGACCGTCC |
| | | | TTCACCAAGATTGGCTTAACGGCAAAGAATATAAGTGCAAGG |
| | | | TAAGCAATAAAGCACTTCCGGCCCCAATCGAGAAAACCATTTC |
| | | | CAAGGCCAAAGGTCAACCAAGAGAACCCCAGGTGTATACTCT |
| | | | TCCGCCTTCTCGTGAGGAAATGACTAAAAATCAAGTATCCCTT |
| | | | ACGTGTCTGGTTAAAGGTTTTTATCCTAGCGATATTGCTGTTGA |
| | | | ATGGGAATCGAACGGTCAGCCGGAGAATAATTATAAAACAAC |
| | | | GCCACCCGTCCTGGATAGCGACGGCTCATTTTTTCTGTATAGC |
| | | | AAACTGACTGTAGATAAATCACGGTGGCAGCAGGGCAATGTA |
| | | | TTCAGTTGCTCCGTTATGCATGAAGCGTTACATAATCACTACA |
| | | | CGCAGAAATCTCTTAGTCTTTCACCCGGT |
| 1362 | ATX-P-3384 | HC IgG1 Fc nt | CAGGTGCAGCTGCAGGAGTCGGGCCCAGGACTGGTGAAGCCT |
| | | | TCGGGGACCCTGTCCCTCACCTGCGCTGTCTCTGGTGGCTCCAT |
| | | | CAGCAGTGATAACTGGTGGAATTGGGTCCGCCAGCCCCCAGG |
| | | | GAAGGGGCTGGAGTGGCTTGGAAAAATCTATCATAGTGGGAA |
| | | | CACCGACTACAACCCGTCCCTCAAGAGTCGAGTCACCATATCA |
| | | | GTAGACAAGTCCAAGAATCAGTTCTCCCTGAGGCTGAGTTCTG |
| | | | TGACCGCCGCGGACACGGCCGTGTATTACTGTGCGAGAGGTG |
| | | | GAACTGAAACTACGGGGTACATGGACGTCTGGGGCAAAGGGA |
| | | | CCACGGTCACCGTCTCCTCAGCTAGCACTAAAGGGCCTTCTGT |
| | | | ATTTCCCTTGGCCCCGTCCAGCAAATCGACCTCGGGAGGGACA |
| | | | GCCGCCCTGGGTTGCCTTGTGAAAGATTATTTCCCTGAGCCAG |
| | | | TTACCGTAAGTTGGAACAGTGGGGCGCTGACAAGTGGTGTGC |
| | | | ACACGTTTCCTGCCGTCCTGCAATCATCGGGCTTGTATAGCCTC |
| | | | AGCTCTGTGGTCACTGTCCCAAGTTCATCGCTGGGCACTCAGA |
| | | | CGTATATTTGCAATGTGAACCACAAACCTTCAAATACAAAAGT |
| | | | GGATAAACGCGTAGAACCGAAATCGTGTGATAAAACTCACAC |
| | | | ATGCCCGCCATGCCCGGCACCTGAACTGCTTGGTGGTCCCAGC |
| | | | GTGTTCCTGTTCCCGCCGAAGCCTAAAGATACTCTAATGATCA |
| | | | GCCGTACGCCAGAGGTGACATGTGTCGTGGTTGACGTGTCCCA |
| | | | CGAAGATCCCGAAGTTAAGTTCAATTGGTATGTTGATGGTGTA |
| | | | GAGGTACACAATGCTAAGACTAAACCTCGCGAGGAGCAGTAC |
| | | | GCCTCGACCTATCGTGTCGTGAGCGTTCTGACCGTCCTTCACC |
| | | | AAGATTGGCTTAACGGCAAAGAATATAAGTGCAAGGTAAGCA |
| | | | ATAAAGCACTTCCGGCCCCAATCGAGAAAACCATTTCCAAGGC |
| | | | CAAAGGTCAACCAAGAGAACCCCAGGTGTATACTCTTCCGCCT |
| | | | TCTCGTGAGGAAATGACTAAAAATCAAGTATCCCTTACGTGTC |
| | | | TGGTTAAAGGTTTTTATCCTAGCGATATTGCTGTTGAATGGGA |
| | | | ATCGAACGGTCAGCCGGAGAATAATTATAAAACAACGCCACC |
| | | | CGTCCTGGATAGCGACGGCTCATTTTTTCTGTATAGCAAACTG |
| | | | ACTGTAGATAAATCACGGTGGCAGCAGGGCAATGTATTCAGTT |
| | | | GCTCCGTTATGCATGAAGCGTTACATAATCACTACACGCAGAA |
| | | | ATCTCTTAGTCTTTCACCCGGT |
| 1363 | ATX-P-3386 | HC IgG1 Fc nt | CAGGTGCAGCTGCAGGAGTCGGGCCCAGGACTGGTGAAGCCT |
| | | | TCGGGGACCCTGTCCCTCACCTGCGCTGTCTCTGGTGGCTCCAT |
| | | | CAGCAATGATAACTGGTGGAGTTGGGTCCGCCAGCCCCCAGG |
| | | | GAAGGGGCTGGAATGGATTGGGAAAATCTATCATAGTGGGTT |
| | | | CACCAACTACAACCCGTCCCTCAAGAGTCGAGTCACCATATCA |
| | | | GTAGACAAGTCCAAGAACCAGTTCTCCCTGAAGCTGAACTCTG |
| | | | TGACCGCCGCGGACACGGCCGTGTATTACTGTGCGAGAGGGG |
| | | | GGGATAACTTTATGGAGGGGGAGGGGTTAGGGACCTGGGGCC |
| | | | CGGGAACCCTGGTCACCGTCTCCTCAGCTAGCACTAAAGGGCC |
| | | | TTCTGTATTTCCCTTGGCCCCGTCCAGCAAATCGACCTCGGGA |
| | | | GGGACAGCCGCCCTGGGTTGCCTTGTGAAAGATTATTTCCCTG |
| | | | AGCCAGTTACCGTAAGTTGGAACAGTGGGGCGCTGACAAGTG |
| | | | GTGTGCACACGTTTCCTGCCGTCCTGCAATCATCGGGCTTGTAT |
| | | | AGCCTCAGCTCTGTGGTCACTGTCCCAAGTTCATCGCTGGGCA |
| | | | CTCAGACGTATATTTGCAATGTGAACCACAAACCTTCAAATAC |
| | | | AAAAGTGGATAAACGCGTAGAACCGAAATCGTGTGATAAAAC |
| | | | TCACACATGCCCGCCATGCCCGGCACCTGAACTGCTTGGTGGT |
| | | | CCCAGCGTGTTCCTGTTCCCGCCGAAGCCTAAAGATACTCTAA |
| | | | TGATCAGCCGTACGCCAGAGGTGACATGTGTCGTGGTTGACGT |
| | | | GTCCCACGAAGATCCCGAAGTTAAGTTCAATTGGTATGTTGAT |
| | | | GGTGTAGAGGTACACAATGCTAAGACTAAACCTCGCGAGGAG |
| | | | CAGTACGCCTCGACCTATCGTGTCGTGAGCGTTCTGACCGTCC |
| | | | TTCACCAAGATTGGCTTAACGGCAAAGAATATAAGTGCAAGG |
| | | | TAAGCAATAAAGCACTTCCGGCCCCAATCGAGAAAACCATTTC |
| | | | CAAGGCCAAAGGTCAACCAAGAGAACCCCAGGTGTATACTCT |
| | | | TCCGCCTTCTCGTGAGGAAATGACTAAAAATCAAGTATCCCTT |
| | | | ACGTGTCTGGTTAAAGGTTTTTATCCTAGCGATATTGCTGTTGA |
| | | | ATGGGAATCGAACGGTCAGCCGGAGAATAATTATAAAACAAC |
| | | | GCCACCCGTCCTGGATAGCGACGGCTCATTTTTTCTGTATAGC |
| | | | AAACTGACTGTAGATAAATCACGGTGGCAGCAGGGCAATGTA |
| | | | TTCAGTTGCTCCGTTATGCATGAAGCGTTACATAATCACTACA |
| | | | CGCAGAAATCTCTTAGTCTTTCACCCGGT |
| 1364 | ATX-P-3387 | HC IgG1 Fc nt | CAGGTGCAGCTGCAGGAGTCGGGCCCAGGACTGGTGAAGCCT |
| | | | TCGGGGACCCTGTCCCTCACCTGCGCTGTCTCTGGTGGCTCCAT |
| | | | CAGCAATGATAACTGGTGGAATTGGGTCCGCCAGTCCCCAGG |
| | | | GAAGGGGCTGGAGTGGATTGGAAAAATCTATCATAGTGGGTT |
| | | | CACCGACTACAACCCGTCCCTCAAGAGTCGAGTCACCATATCA |
| | | | GTAGACAAGTCCAAGAACCAGTTCTCCCTGAAGCTGAGCTCTG |
| | | | TGACCGCCGCGGACACGGCCGTGTATTATTGTGCGAGAGGAA |
| | | | ACCATAACTATTTGTGGATTGGGTATTTGGGGACCTGGGGCCC |
| | | | GGGAACCCTGGTCACCGTCTCCTCAGCTAGCACTAAAGGGCCT |
| | | | TCTGTATTTCCCTTGGCCCCGTCCAGCAAATCGACCTCGGGAG |
| | | | GGACAGCCGCCCTGGGTTGCCTTGTGAAAGATTATTTCCCTGA |
| | | | GCCAGTTACCGTAAGTTGGAACAGTGGGGCGCTGACAAGTGG |
| | | | TGTGCACACGTTTCCTGCCGTCCTGCAATCATCGGGCTTGTATA |
| | | | GCCTCAGCTCTGTGGTCACTGTCCCAAGTTCATCGCTGGGCAC |
| | | | TCAGACGTATATTTGCAATGTGAACCACAAACCTTCAAATACA |
| | | | AAAGTGGATAAACGCGTAGAACCGAAATCGTGTGATAAAACT |
| | | | CACACATGCCCGCCATGCCCGGCACCTGAACTGCTTGGTGGTC |
| | | | CCAGCGTGTTCCTGTTCCCGCCGAAGCCTAAAGATACTCTAAT |
| | | | GATCAGCCGTACGCCAGAGGTGACATGTGTCGTGGTTGACGTG |
| | | | TCCCACGAAGATCCCGAAGTTAAGTTCAATTGGTATGTTGATG |
| | | | GTGTAGAGGTACACAATGCTAAGACTAAACCTCGCGAGGAGC |
| | | | AGTACGCCTCGACCTATCGTGTCGTGAGCGTTCTGACCGTCCT |
| | | | TCACCAAGATTGGCTTAACGGCAAAGAATATAAGTGCAAGGT |
| | | | AAGCAATAAAGCACTTCCGGCCCCAATCGAGAAAACCATTTCC |
| | | | AAGGCCAAAGGTCAACCAAGAGAACCCCAGGTGTATACTCTT |
| | | | CCGCCTTCTCGTGAGGAAATGACTAAAAATCAAGTATCCCTTA |
| | | | CGTGTCTGGTTAAAGGTTTTTATCCTAGCGATATTGCTGTTGAA |
| | | | TGGGAATCGAACGGTCAGCCGGAGAATAATTATAAAACAACG |
| | | | CCACCCGTCCTGGATAGCGACGGCTCATTTTTTCTGTATAGCA |
| | | | AACTGACTGTAGATAAATCACGGTGGCAGCAGGGCAATGTAT |
| | | | TCAGTTGCTCCGTTATGCATGAAGCGTTACATAATCACTACAC |
| | | | GCAGAAATCTCTTAGTCTTTCACCCGGT |
| 1365 | ATX-P-3389 | HC IgG1 Fc nt | CAGGTGCAGCTGCAGGAGTCGGGCCCAGGACTGGTGAAGCCT |
| | | | TCGGGGACCCTGTCCCTCATCTGCGCTGTCTCTGGTGGCTCCAT |
| | | | CAGTAGTAGTAATTGGTGGAGTTGGGTCCGCCAGCCCCCAGGG |
| | | | AAGGGGCTGGAGTGGATTGGGAGAATCTATCATAGTGGGCAC |
| | | | ACCAACTACAACCCGTCCCTCAAGAGTCGAGTCACCATATCAG |
| | | | TAGACAAGTCCAAGAACCAGTTCTCCCTGAAGCTGACCTCTGT |
| | | | GACCGCCGCGGACACGGCCGTGTATTACTGTGCGAGAGGGAG |
| | | | GGACTTAACTGGATACTTTGACTACTGGGGCCAGGGAACCCTG |
| | | | GTCACCGTCTCCTCAGCTAGCACTAAAGGGCCTTCTGTATTTCC |
| | | | CTTGGCCCCGTCCAGCAAATCGACCTCGGGAGGGACAGCCGC |
| | | | CCTGGGTTGCCTTGTGAAAGATTATTTCCCTGAGCCAGTTACC |
| | | | GTAAGTTGGAACAGTGGGGCGCTGACAAGTGGTGTGCACACG |
| | | | TTTCCTGCCGTCCTGCAATCATCGGGCTTGTATAGCCTCAGCTC |
| | | | TGTGGTCACTGTCCCAAGTTCATCGCTGGGCACTCAGACGTAT |
| | | | ATTTGCAATGTGAACCACAAACCTTCAAATACAAAAGTGGATA |
| | | | AACGCGTAGAACCGAAATCGTGTGATAAAACTCACACATGCC |
| | | | CGCCATGCCCGGCACCTGAACTGCTTGGTGGTCCCAGCGTGTT |
| | | | CCTGTTCCCGCCGAAGCCTAAAGATACTCTAATGATCAGCCGT |
| | | | ACGCCAGAGGTGACATGTGTCGTGGTTGACGTGTCCCACGAAG |
| | | | ATCCCGAAGTTAAGTTCAATTGGTATGTTGATGGTGTAGAGGT |
| | | | ACACAATGCTAAGACTAAACCTCGCGAGGAGCAGTACGCCTC |
| | | | GACCTATCGTGTCGTGAGCGTTCTGACCGTCCTTCACCAAGAT |
| | | | TGGCTTAACGGCAAAGAATATAAGTGCAAGGTAAGCAATAAA |
| | | | GCACTTCCGGCCCCAATCGAGAAAACCATTTCCAAGGCCAAA |
| | | | GGTCAACCAAGAGAACCCCAGGTGTATACTCTTCCGCCTTCTC |
| | | | GTGAGGAAATGACTAAAAATCAAGTATCCCTTACGTGTCTGGT |
| | | | TAAAGGTTTTTATCCTAGCGATATTGCTGTTGAATGGGAATCG |
| | | | AACGGTCAGCCGGAGAATAATTATAAAACAACGCCACCCGTC |
| | | | CTGGATAGCGACGGCTCATTTTTTCTGTATAGCAAACTGACTG |
| | | | TAGATAAATCACGGTGGCAGCAGGGCAATGTATTCAGTTGCTC |
| | | | CGTTATGCATGAAGCGTTACATAATCACTACACGCAGAAATCT |
| | | | CTTAGTCTTTCACCCGGT |
| 1366 | ATX-P-3391 | HC IgG1 Fc nt | CAGGTGCAGCTGCAGGAGTCGGGCCCAGGACTGGTGAAACCT |
| | | | TCGGGGACCCTGTCCCTCACCTGCGCTGTCTCTGGTGGCTCCAT |
| | | | CAGTAATGATAACTGGTGGAGTTGGGTCCGCCAGTCCCCCGGG |
| | | | AAGGGGCTGGAGTGGATTGGGAAAATCTATCATAGTGAGTTC |
| | | | ACCAACTACAACCCGTCCCTCAAGAGTCGAGTCACCATATCAG |
| | | | TAGACAAGTCCAAGAACCAGTTCTCCCTGGAGCTGAGCTCTGT |
| | | | GACCGCCGCGGACACGGCCGTATATTACTGTGCGAGAGGGGT |
| | | | CGATTTTTGGAGTGGTTCCCACATGGACGTCTGGGGCAAAGGG |
| | | | ACCACGGTCACCGTCTCCTCAGCTAGCACTAAAGGGCCTTCTG |
| | | | TATTTCCCTTGGCCCCGTCCAGCAAATCGACCTCGGGAGGGAC |
| | | | AGCCGCCCTGGGTTGCCTTGTGAAAGATTATTTCCCTGAGCCA |
| | | | GTTACCGTAAGTTGGAACAGTGGGGCGCTGACAAGTGGTGTG |
| | | | CACACGTTTCCTGCCGTCCTGCAATCATCGGGCTTGTATAGCCT |
| | | | CAGCTCTGTGGTCACTGTCCCAAGTTCATCGCTGGGCACTCAG |
| | | | ACGTATATTTGCAATGTGAACCACAAACCTTCAAATACAAAAG |
| | | | TGGATAAACGCGTAGAACCGAAATCGTGTGATAAAACTCACA |
| | | | CATGCCCGCCATGCCCGGCACCTGAACTGCTTGGTGGTCCCAG |
| | | | CGTGTTCCTGTTCCCGCCGAAGCCTAAAGATACTCTAATGATC |
| | | | AGCCGTACGCCAGAGGTGACATGTGTCGTGGTTGACGTGTCCC |
| | | | ACGAAGATCCCGAAGTTAAGTTCAATTGGTATGTTGATGGTGT |
| | | | AGAGGTACACAATGCTAAGACTAAACCTCGCGAGGAGCAGTA |
| | | | CGCCTCGACCTATCGTGTCGTGAGCGTTCTGACCGTCCTTCACC |
| | | | AAGATTGGCTTAACGGCAAAGAATATAAGTGCAAGGTAAGCA |
| | | | ATAAAGCACTTCCGGCCCCAATCGAGAAAACCATTTCCAAGGC |
| | | | CAAAGGTCAACCAAGAGAACCCCAGGTGTATACTCTTCCGCCT |
| | | | TCTCGTGAGGAAATGACTAAAAATCAAGTATCCCTTACGTGTC |
| | | | TGGTTAAAGGTTTTTATCCTAGCGATATTGCTGTTGAATGGGA |
| | | | ATCGAACGGTCAGCCGGAGAATAATTATAAAACAACGCCACC |
| | | | CGTCCTGGATAGCGACGGCTCATTTTTTCTGTATAGCAAACTG |
| | | | ACTGTAGATAAATCACGGTGGCAGCAGGGCAATGTATTCAGTT |
| | | | GCTCCGTTATGCATGAAGCGTTACATAATCACTACACGCAGAA |
| | | | ATCTCTTAGTCTTTCACCCGGT |
| 1367 | ATX-P-3392 | HC IgG1 Fc nt | CAGGTGCAGCTGCAGGAGTCGGGCCCAGGACTGGTGAAGCCT |
| | | | TCGGGGACCCTGTCCCTCACCTGCGCTGTCTCTGGTGGCTCCAT |
| | | | CAGTAATGATAACTGGTGGAGTTGGGTCCGCCAGTCCCCCGGG |
| | | | AAGGGGCTGGAGTGGATTGGGAAAATCTATCATAGTGAGTTC |
| | | | ACCAACTACAACCCGTCCCTCAAGAGTCGAGTCACCATATCAG |
| | | | TAGACAAGTCTAAGAACCAGTTTTCCCTGGAACTGAGCTCTGT |
| | | | GACCGCCGCGGACACGGCCGTGTATTTCTGTGCGCGAGAAGG |
| | | | ACTGGAACTACCCCACATGGACGTCTGGGGCAAAGGGACCAC |
| | | | GGTCACCGTCTCCTCAGCTAGCACTAAAGGGCCTTCTGTATTT |
| | | | CCCTTGGCCCCGTCCAGCAAATCGACCTCGGGAGGGACAGCC |
| | | | GCCCTGGGTTGCCTTGTGAAAGATTATTTCCCTGAGCCAGTTA |
| | | | CCGTAAGTTGGAACAGTGGGGCGCTGACAAGTGGTGTGCACA |
| | | | CGTTTCCTGCCGTCCTGCAATCATCGGGCTTGTATAGCCTCAGC |
| | | | TCTGTGGTCACTGTCCCAAGTTCATCGCTGGGCACTCAGACGT |
| | | | ATATTTGCAATGTGAACCACAAACCTTCAAATACAAAAGTGGA |
| | | | TAAACGCGTAGAACCGAAATCGTGTGATAAAACTCACACATG |
| | | | CCCGCCATGCCCGGCACCTGAACTGCTTGGTGGTCCCAGCGTG |
| | | | TTCCTGTTCCCGCCGAAGCCTAAAGATACTCTAATGATCAGCC |
| | | | GTACGCCAGAGGTGACATGTGTCGTGGTTGACGTGTCCCACGA |
| | | | AGATCCCGAAGTTAAGTTCAATTGGTATGTTGATGGTGTAGAG |
| | | | GTACACAATGCTAAGACTAAACCTCGCGAGGAGCAGTACGCC |
| | | | TCGACCTATCGTGTCGTGAGCGTTCTGACCGTCCTTCACCAAG |
| | | | ATTGGCTTAACGGCAAAGAATATAAGTGCAAGGTAAGCAATA |
| | | | AAGCACTTCCGGCCCCAATCGAGAAAACCATTTCCAAGGCCA |
| | | | AAGGTCAACCAAGAGAACCCCAGGTGTATACTCTTCCGCCTTC |
| | | | TCGTGAGGAAATGACTAAAAATCAAGTATCCCTTACGTGTCTG |
| | | | GTTAAAGGTTTTTATCCTAGCGATATTGCTGTTGAATGGGAAT |
| | | | CGAACGGTCAGCCGGAGAATAATTATAAAACAACGCCACCCG |
| | | | TCCTGGATAGCGACGGCTCATTTTTTCTGTATAGCAAACTGAC |
| | | | TGTAGATAAATCACGGTGGCAGCAGGGCAATGTATTCAGTTGC |
| | | | TCCGTTATGCATGAAGCGTTACATAATCACTACACGCAGAAAT |
| | | | CTCTTAGTCTTTCACCCGGT |
| 1368 | ATX-P-3395 | HC IgG1 Fc nt | GAGGTGCAGCTGGTGGAGTCCGGGGGAGGCGTGGTCAAGCCT |
| | | | GGGGGGTCCCTGAGACTCTCCTGTGCAGCCTCTGGATTCACCT |
| | | | TCAGTAGCTACTGGATGCACTGGGTCCGCCAAGCTCCAGGGAA |
| | | | GGGGCTGGTGTGGGTCTCACGTATTAATAGTGATGGAAGTAGC |
| | | | ACAAGCTACGCGGACTCCGTGCAGGGCCGATTCACCATCTCCA |
| | | | GAGACATCGCCAAGAACACGCTGTATCTGCAAATGAACAGTC |
| | | | TGAGAGCCGAGGACACGGCTGTGTATTACTGTGCAAGAGGGC |
| | | | AGCACCTGGTTCAGGACTATTGGGGCCAGGGAACCCTGGTCAC |
| | | | CGTCTCTTCAGCTAGCACTAAAGGGCCTTCTGTATTTCCCTTGG |
| | | | CCCCGTCCAGCAAATCGACCTCGGGAGGGACAGCCGCCCTGG |
| | | | GTTGCCTTGTGAAAGATTATTTCCCTGAGCCAGTTACCGTAAG |
| | | | TTGGAACAGTGGGGCGCTGACAAGTGGTGTGCACACGTTTCCT |
| | | | GCCGTCCTGCAATCATCGGGCTTGTATAGCCTCAGCTCTGTGG |
| | | | TCACTGTCCCAAGTTCATCGCTGGGCACTCAGACGTATATTTG |
| | | | CAATGTGAACCACAAACCTTCAAATACAAAAGTGGATAAACG |
| | | | CGTAGAACCGAAATCGTGTGATAAAACTCACACATGCCCGCC |
| | | | ATGCCCGGCACCTGAACTGCTTGGTGGTCCCAGCGTGTTCCTG |
| | | | TTCCCGCCGAAGCCTAAAGATACTCTAATGATCAGCCGTACGC |
| | | | CAGAGGTGACATGTGTCGTGGTTGACGTGTCCCACGAAGATCC |
| | | | CGAAGTTAAGTTCAATTGGTATGTTGATGGTGTAGAGGTACAC |
| | | | AATGCTAAGACTAAACCTCGCGAGGAGCAGTACGCCTCGACC |
| | | | TATCGTGTCGTGAGCGTTCTGACCGTCCTTCACCAAGATTGGC |
| | | | TTAACGGCAAAGAATATAAGTGCAAGGTAAGCAATAAAGCAC |
| | | | TTCCGGCCCCAATCGAGAAAACCATTTCCAAGGCCAAAGGTCA |
| | | | ACCAAGAGAACCCCAGGTGTATACTCTTCCGCCTTCTCGTGAG |
| | | | GAAATGACTAAAAATCAAGTATCCCTTACGTGTCTGGTTAAAG |
| | | | GTTTTTATCCTAGCGATATTGCTGTTGAATGGGAATCGAACGG |
| | | | TCAGCCGGAGAATAATTATAAAACAACGCCACCCGTCCTGGAT |
| | | | AGCGACGGCTCATTTTTTCTGTATAGCAAACTGACTGTAGATA |
| | | | AATCACGGTGGCAGCAGGGCAATGTATTCAGTTGCTCCGTTAT |
| | | | GCATGAAGCGTTACATAATCACTACACGCAGAAATCTCTTAGT |
| | | | CTTTCACCCGGT |
| 1369 | ATX-P-3396 | HC IgG1 Fc nt | CAGGTGCAGCTGGTGCAGTCTGGGGCTGAGGTGAAGAACCCT |
| | | | GGGGCCTCAGTGAAGGTCTCCTGCAAGGCTTCTGGATACACCT |
| | | | TCACCGGCTACTATATGCACTGGGTGCGACAGGCCCCTGGACA |
| | | | AGGGCTTGAGTGGATGGGATGGATCAACCCTAACAGTGGTGG |
| | | | CACAAACTATGCACAGAAGTTTCAGGGCAGGGTCACCATGAC |
| | | | CAGGGACACGTCCATCAGCACAGCCTACATGGAGCTGAGCAG |
| | | | GCTGAGATCTGACGACACGGCCGTGTATTACTGTGCGAGAGA |
| | | | ACGGGGCGACTATGATGGCGATGCTTTTGATATCTGGGGACAA |
| | | | GGGACAATGGTCACCGTCTCTTCAGCTAGCACTAAAGGGCCTT |
| | | | CTGTATTTCCCTTGGCCCCGTCCAGCAAATCGACCTCGGGAGG |
| | | | GACAGCCGCCCTGGGTTGCCTTGTGAAAGATTATTTCCCTGAG |
| | | | CCAGTTACCGTAAGTTGGAACAGTGGGGCGCTGACAAGTGGT |
| | | | GTGCACACGTTTCCTGCCGTCCTGCAATCATCGGGCTTGTATA |
| | | | GCCTCAGCTCTGTGGTCACTGTCCCAAGTTCATCGCTGGGCAC |
| | | | TCAGACGTATATTTGCAATGTGAACCACAAACCTTCAAATACA |
| | | | AAAGTGGATAAACGCGTAGAACCGAAATCGTGTGATAAAACT |
| | | | CACACATGCCCGCCATGCCCGGCACCTGAACTGCTTGGTGGTC |
| | | | CCAGCGTGTTCCTGTTCCCGCCGAAGCCTAAAGATACTCTAAT |
| | | | GATCAGCCGTACGCCAGAGGTGACATGTGTCGTGGTTGACGTG |
| | | | TCCCACGAAGATCCCGAAGTTAAGTTCAATTGGTATGTTGATG |
| | | | GTGTAGAGGTACACAATGCTAAGACTAAACCTCGCGAGGAGC |
| | | | AGTACGCCTCGACCTATCGTGTCGTGAGCGTTCTGACCGTCCT |
| | | | TCACCAAGATTGGCTTAACGGCAAAGAATATAAGTGCAAGGT |
| | | | AAGCAATAAAGCACTTCCGGCCCCAATCGAGAAAACCATTTCC |
| | | | AAGGCCAAAGGTCAACCAAGAGAACCCCAGGTGTATACTCTT |
| | | | CCGCCTTCTCGTGAGGAAATGACTAAAAATCAAGTATCCCTTA |
| | | | CGTGTCTGGTTAAAGGTTTTTATCCTAGCGATATTGCTGTTGAA |
| | | | TGGGAATCGAACGGTCAGCCGGAGAATAATTATAAAACAACG |
| | | | CCACCCGTCCTGGATAGCGACGGCTCATTTTTTCTGTATAGCA |
| | | | AACTGACTGTAGATAAATCACGGTGGCAGCAGGGCAATGTAT |
| | | | TCAGTTGCTCCGTTATGCATGAAGCGTTACATAATCACTACAC |
| | | | GCAGAAATCTCTTAGTCTTTCACCCGGT |
| 1370 | ATX-P-3397 | HC IgG1 Fc nt | GAGGTGCAGCTGGTGGAGTCTGGGGGAGGCTTGGTCCAGCCT |
| | | | GGGGGGTCCCTGAGACTCTCCTGTGCAGCCTCTGGATTCACCT |
| | | | TTAGTAACTATTACATGAACTGGGTCCGCCAGGCTCCAGGGAA |
| | | | GGGGCTGGAGTGGGTGGCCAACATAAAGCAAGATGGAAGTGA |
| | | | GAAATACTATGTGGACTCTGTGAAGGGCCGCTTCACCATCTCC |
| | | | AGAGACAACGCCAAGAACTCACTGTATCTCCAAATGAACAGC |
| | | | CTGAGAGCCGAGGACACGGCTGTGTATTACTGTGCGAGAGAT |
| | | | GGGTACTACAACTTCGATGCTTTTGATATCTGGGGACAAGGGA |
| | | | CAATGGTCACCGTCTCTTCAGCTAGCACTAAAGGGCCTTCTGT |
| | | | ATTTCCCTTGGCCCCGTCCAGCAAATCGACCTCGGGAGGGACA |
| | | | GCCGCCCTGGGTTGCCTTGTGAAAGATTATTTCCCTGAGCCAG |
| | | | TTACCGTAAGTTGGAACAGTGGGGCGCTGACAAGTGGTGTGC |
| | | | ACACGTTTCCTGCCGTCCTGCAATCATCGGGCTTGTATAGCCTC |
| | | | AGCTCTGTGGTCACTGTCCCAAGTTCATCGCTGGGCACTCAGA |
| | | | CGTATATTTGCAATGTGAACCACAAACCTTCAAATACAAAAGT |
| | | | GGATAAACGCGTAGAACCGAAATCGTGTGATAAAACTCACAC |
| | | | ATGCCCGCCATGCCCGGCACCTGAACTGCTTGGTGGTCCCAGC |
| | | | GTGTTCCTGTTCCCGCCGAAGCCTAAAGATACTCTAATGATCA |
| | | | GCCGTACGCCAGAGGTGACATGTGTCGTGGTTGACGTGTCCCA |
| | | | CGAAGATCCCGAAGTTAAGTTCAATTGGTATGTTGATGGTGTA |
| | | | GAGGTACACAATGCTAAGACTAAACCTCGCGAGGAGCAGTAC |
| | | | GCCTCGACCTATCGTGTCGTGAGCGTTCTGACCGTCCTTCACC |
| | | | AAGATTGGCTTAACGGCAAAGAATATAAGTGCAAGGTAAGCA |
| | | | ATAAAGCACTTCCGGCCCCAATCGAGAAAACCATTTCCAAGGC |
| | | | CAAAGGTCAACCAAGAGAACCCCAGGTGTATACTCTTCCGCCT |
| | | | TCTCGTGAGGAAATGACTAAAAATCAAGTATCCCTTACGTGTC |
| | | | TGGTTAAAGGTTTTTATCCTAGCGATATTGCTGTTGAATGGGA |
| | | | ATCGAACGGTCAGCCGGAGAATAATTATAAAACAACGCCACC |
| | | | CGTCCTGGATAGCGACGGCTCATTTTTTCTGTATAGCAAACTG |
| | | | ACTGTAGATAAATCACGGTGGCAGCAGGGCAATGTATTCAGTT |
| | | | GCTCCGTTATGCATGAAGCGTTACATAATCACTACACGCAGAA |
| | | | ATCTCTTAGTCTTTCACCCGGT |
| 1371 | ATX-P-3405 | HC IgG1 Fc nt | GAGGTGCAGCTGGTGGAGTCTGGGGGAGGCTTGGTACAGCCT |
| | | | GGGGGGTCCCTGAGACTCTCCTGTGCAGCCTCTGGATTCACCT |
| | | | TCAGTAGCTATAGCATGAACTGGGTCCGCCAGGCTCCAGGGA |
| | | | AGGGGCTGGAGTGGGTCTCATCCATTAGTAGTAGTAGTAGTTA |
| | | | CATATACTACGCAGACTCAGTGAAGGGCCGATTCACCATCTCC |
| | | | AGAGACAACGCCAAGAACTCACTGTATCTGCAAATGAACAGC |
| | | | CTGAGAGCCGAGGACACGGCCGTGTATTACTGTGCGAGAGAA |
| | | | GGGTATGATAACTGGAACTCTGCTTGTGATATCTGGGGACAAG |
| | | | GGACAATGGTCACCGTCTCTTCAGCTAGCACTAAAGGGCCTTC |
| | | | TGTATTTCCCTTGGCCCCGTCCAGCAAATCGACCTCGGGAGGG |
| | | | ACAGCCGCCCTGGGTTGCCTTGTGAAAGATTATTTCCCTGAGC |
| | | | CAGTTACCGTAAGTTGGAACAGTGGGGCGCTGACAAGTGGTG |
| | | | TGCACACGTTTCCTGCCGTCCTGCAATCATCGGGCTTGTATAG |
| | | | CCTCAGCTCTGTGGTCACTGTCCCAAGTTCATCGCTGGGCACT |
| | | | CAGACGTATATTTGCAATGTGAACCACAAACCTTCAAATACAA |
| | | | AAGTGGATAAACGCGTAGAACCGAAATCGTGTGATAAAACTC |
| | | | ACACATGCCCGCCATGCCCGGCACCTGAACTGCTTGGTGGTCC |
| | | | CAGCGTGTTCCTGTTCCCGCCGAAGCCTAAAGATACTCTAATG |
| | | | ATCAGCCGTACGCCAGAGGTGACATGTGTCGTGGTTGACGTGT |
| | | | CCCACGAAGATCCCGAAGTTAAGTTCAATTGGTATGTTGATGG |
| | | | TGTAGAGGTACACAATGCTAAGACTAAACCTCGCGAGGAGCA |
| | | | GTACGCCTCGACCTATCGTGTCGTGAGCGTTCTGACCGTCCTTC |
| | | | ACCAAGATTGGCTTAACGGCAAAGAATATAAGTGCAAGGTAA |
| | | | GCAATAAAGCACTTCCGGCCCCAATCGAGAAAACCATTTCCAA |
| | | | GGCCAAAGGTCAACCAAGAGAACCCCAGGTGTATACTCTTCC |
| | | | GCCTTCTCGTGAGGAAATGACTAAAAATCAAGTATCCCTTACG |
| | | | TGTCTGGTTAAAGGTTTTTATCCTAGCGATATTGCTGTTGAATG |
| | | | GGAATCGAACGGTCAGCCGGAGAATAATTATAAAACAACGCC |
| | | | ACCCGTCCTGGATAGCGACGGCTCATTTTTTCTGTATAGCAAA |
| | | | CTGACTGTAGATAAATCACGGTGGCAGCAGGGCAATGTATTCA |
| | | | GTTGCTCCGTTATGCATGAAGCGTTACATAATCACTACACGCA |
| | | | GAAATCTCTTAGTCTTTCACCCGGT |
| 1372 | ATX-P-3406 | HC IgG1 Fc nt | CAGATCACCTTGAAGGAGTCTGGTCCTACGCTGGTGAAACCCA |
| | | | CACAGACCCTCACGCTGACCTGCACCTTCTCTGGGTTTTCACTC |
| | | | AGCACTAGTGGAGTGGGTGTGGGCTGGATCCGTCAGCCCCCA |
| | | | GGAAAGGCCCTGGAGTGGCTTGCACTCATTTATTGGAATGGTG |
| | | | ATGAGCGCTACAGCCCATCTCTGAAGAGCAGGCTCACCATCAC |
| | | | CAAGGACACCTCCAAAAACCAAGTGGTCCTTACAATGACCAA |
| | | | CATGGACCCTGTGGACACAGCCACATATTACTGTGCACACAGT |
| | | | CCGAACTGGGGATATGAAGCTTTTGATATCTGGGGACAAGGG |
| | | | ACAATGGTCACCGTCTCTTCAGCTAGCACTAAAGGGCCTTCTG |
| | | | TATTTCCCTTGGCCCCGTCCAGCAAATCGACCTCGGGAGGGAC |
| | | | AGCCGCCCTGGGTTGCCTTGTGAAAGATTATTTCCCTGAGCCA |
| | | | GTTACCGTAAGTTGGAACAGTGGGGCGCTGACAAGTGGTGTG |
| | | | CACACGTTTCCTGCCGTCCTGCAATCATCGGGCTTGTATAGCCT |
| | | | CAGCTCTGTGGTCACTGTCCCAAGTTCATCGCTGGGCACTCAG |
| | | | ACGTATATTTGCAATGTGAACCACAAACCTTCAAATACAAAAG |
| | | | TGGATAAACGCGTAGAACCGAAATCGTGTGATAAAACTCACA |
| | | | CATGCCCGCCATGCCCGGCACCTGAACTGCTTGGTGGTCCCAG |
| | | | CGTGTTCCTGTTCCCGCCGAAGCCTAAAGATACTCTAATGATC |
| | | | AGCCGTACGCCAGAGGTGACATGTGTCGTGGTTGACGTGTCCC |
| | | | ACGAAGATCCCGAAGTTAAGTTCAATTGGTATGTTGATGGTGT |
| | | | AGAGGTACACAATGCTAAGACTAAACCTCGCGAGGAGCAGTA |
| | | | CGCCTCGACCTATCGTGTCGTGAGCGTTCTGACCGTCCTTCACC |
| | | | AAGATTGGCTTAACGGCAAAGAATATAAGTGCAAGGTAAGCA |
| | | | ATAAAGCACTTCCGGCCCCAATCGAGAAAACCATTTCCAAGGC |
| | | | CAAAGGTCAACCAAGAGAACCCCAGGTGTATACTCTTCCGCCT |
| | | | TCTCGTGAGGAAATGACTAAAAATCAAGTATCCCTTACGTGTC |
| | | | TGGTTAAAGGTTTTTATCCTAGCGATATTGCTGTTGAATGGGA |
| | | | ATCGAACGGTCAGCCGGAGAATAATTATAAAACAACGCCACC |
| | | | CGTCCTGGATAGCGACGGCTCATTTTTTCTGTATAGCAAACTG |
| | | | ACTGTAGATAAATCACGGTGGCAGCAGGGCAATGTATTCAGTT |
| | | | GCTCCGTTATGCATGAAGCGTTACATAATCACTACACGCAGAA |
| | | | ATCTCTTAGTCTTTCACCCGGT |
| 1373 | ATX-P-3407 | HC IgG1 Fc nt | GAGGTGCAGCTGGTGGAGTCTGGGGGAGGCCTGGTCCCGCCT |
| | | | GGGGGGTCCCTGAGACTCTCCTGTGCAGCCTCTGGATTCACCT |
| | | | TCAGTAGCTATTGCATGAACTGGGTCCGCCAGGCTCCAGGGAA |
| | | | GGGGCTGGAGTGGGTCTCATCCATTAATAGTGATAGTAGTTAC |
| | | | ATATACTACGCGGACTCAGTGAAGGGCCGATTCACCATCTCCA |
| | | | GAGACAACGCCAAGAACTCACTGTATCTGCAAATGAACAGCC |
| | | | TGAGAGCCGAGGACACGGCTGTGTATTACTGTGCGAGAGAGG |
| | | | GATACTACAACTGGAACGGAGGGAATGACTACTGGGGCCAGG |
| | | | GAACCCTGGTCACCGTCTCCTCAGCTAGCACTAAAGGGCCTTC |
| | | | TGTATTTCCCTTGGCCCCGTCCAGCAAATCGACCTCGGGAGGG |
| | | | ACAGCCGCCCTGGGTTGCCTTGTGAAAGATTATTTCCCTGAGC |
| | | | CAGTTACCGTAAGTTGGAACAGTGGGGCGCTGACAAGTGGTG |
| | | | TGCACACGTTTCCTGCCGTCCTGCAATCATCGGGCTTGTATAG |
| | | | CCTCAGCTCTGTGGTCACTGTCCCAAGTTCATCGCTGGGCACT |
| | | | CAGACGTATATTTGCAATGTGAACCACAAACCTTCAAATACAA |
| | | | AAGTGGATAAACGCGTAGAACCGAAATCGTGTGATAAAACTC |
| | | | ACACATGCCCGCCATGCCCGGCACCTGAACTGCTTGGTGGTCC |
| | | | CAGCGTGTTCCTGTTCCCGCCGAAGCCTAAAGATACTCTAATG |
| | | | ATCAGCCGTACGCCAGAGGTGACATGTGTCGTGGTTGACGTGT |
| | | | CCCACGAAGATCCCGAAGTTAAGTTCAATTGGTATGTTGATGG |
| | | | TGTAGAGGTACACAATGCTAAGACTAAACCTCGCGAGGAGCA |
| | | | GTACGCCTCGACCTATCGTGTCGTGAGCGTTCTGACCGTCCTTC |
| | | | ACCAAGATTGGCTTAACGGCAAAGAATATAAGTGCAAGGTAA |
| | | | GCAATAAAGCACTTCCGGCCCCAATCGAGAAAACCATTTCCAA |
| | | | GGCCAAAGGTCAACCAAGAGAACCCCAGGTGTATACTCTTCC |
| | | | GCCTTCTCGTGAGGAAATGACTAAAAATCAAGTATCCCTTACG |
| | | | TGTCTGGTTAAAGGTTTTTATCCTAGCGATATTGCTGTTGAATG |
| | | | GGAATCGAACGGTCAGCCGGAGAATAATTATAAAACAACGCC |
| | | | ACCCGTCCTGGATAGCGACGGCTCATTTTTTCTGTATAGCAAA |
| | | | CTGACTGTAGATAAATCACGGTGGCAGCAGGGCAATGTATTCA |
| | | | GTTGCTCCGTTATGCATGAAGCGTTACATAATCACTACACGCA |
| | | | GAAATCTCTTAGTCTTTCACCCGGT |
| 1374 | ATX-P-3408 | HC IgG1 Fc nt | GAGGTGCAGCTGGTGGAGTCCGGGGGAGGCTTAGTTCAGCCT |
| | | | GGGGGGTCCCTGAGACTCTCCTGTGCAGCCTCTGGATTCACCT |
| | | | TCAGTAGCTATTGGATGCACTGGGTCCGCCAAGCTCCAGGGAA |
| | | | GGGGCTGGTGTGGGTCTCACATATTAATAGTGATGGGAGTAGC |
| | | | ACAAACTACGCGGACTCCGTGAAGGGCCGATTCACCATCTCCA |
| | | | GAGACAACGCCAAGAACACGCTGTATCTGCAGATGAACAGTC |
| | | | TGAGATCCGAGGACACGGCTGTATATTACTGTGCAAGAGAGG |
| | | | GTTACTGGAACGGTGATACTTTTGATATCTGGGGACAAGGGAC |
| | | | AATGGTCACCGTCTCTTCAGCTAGCACTAAAGGGCCTTCTGTA |
| | | | TTTCCCTTGGCCCCGTCCAGCAAATCGACCTCGGGAGGGACAG |
| | | | CCGCCCTGGGTTGCCTTGTGAAAGATTATTTCCCTGAGCCAGT |
| | | | TACCGTAAGTTGGAACAGTGGGGCGCTGACAAGTGGTGTGCA |
| | | | CACGTTTCCTGCCGTCCTGCAATCATCGGGCTTGTATAGCCTCA |
| | | | GCTCTGTGGTCACTGTCCCAAGTTCATCGCTGGGCACTCAGAC |
| | | | GTATATTTGCAATGTGAACCACAAACCTTCAAATACAAAAGTG |
| | | | GATAAACGCGTAGAACCGAAATCGTGTGATAAAACTCACACA |
| | | | TGCCCGCCATGCCCGGCACCTGAACTGCTTGGTGGTCCCAGCG |
| | | | TGTTCCTGTTCCCGCCGAAGCCTAAAGATACTCTAATGATCAG |
| | | | CCGTACGCCAGAGGTGACATGTGTCGTGGTTGACGTGTCCCAC |
| | | | GAAGATCCCGAAGTTAAGTTCAATTGGTATGTTGATGGTGTAG |
| | | | AGGTACACAATGCTAAGACTAAACCTCGCGAGGAGCAGTACG |
| | | | CCTCGACCTATCGTGTCGTGAGCGTTCTGACCGTCCTTCACCA |
| | | | AGATTGGCTTAACGGCAAAGAATATAAGTGCAAGGTAAGCAA |
| | | | TAAAGCACTTCCGGCCCCAATCGAGAAAACCATTTCCAAGGCC |
| | | | AAAGGTCAACCAAGAGAACCCCAGGTGTATACTCTTCCGCCTT |
| | | | CTCGTGAGGAAATGACTAAAAATCAAGTATCCCTTACGTGTCT |
| | | | GGTTAAAGGTTTTTATCCTAGCGATATTGCTGTTGAATGGGAA |
| | | | TCGAACGGTCAGCCGGAGAATAATTATAAAACAACGCCACCC |
| | | | GTCCTGGATAGCGACGGCTCATTTTTTCTGTATAGCAAACTGA |
| | | | CTGTAGATAAATCACGGTGGCAGCAGGGCAATGTATTCAGTTG |
| | | | CTCCGTTATGCATGAAGCGTTACATAATCACTACACGCAGAAA |
| | | | TCTCTTAGTCTTTCACCCGGT |
| 1375 | ATX-P-3410 | HC IgG1 Fc nt | GAGGTGCAGCTGGTGGAGTCTGGGGGAGGCTTGGTACAGCCT |
| | | | GGGGGGTCCCTGAGACTCTCCTGTGCAGCCTCTGGATTCACCT |
| | | | TCAGTGCCTACGACATGCACTGGGTCCGCCAAACTCCAGGAAA |
| | | | AGGTCTGGAGTGGGTCTCAACTATTGGTACTGCTGGTGACACA |
| | | | TACTATCCAGACTCCGTGAAGGGCCGATTCACCATCTCCAGAG |
| | | | ATTTTGCCAGGAGGTCCTTGTATCTTCACATGAACAATCTGAG |
| | | | AGCCGGGGACACGGCTGTATATTACTGTGCAAGAGGGGGCAG |
| | | | CAGCAGCTGGTACGACTGGTACTTCGATCTCTGGGGCCGTGGC |
| | | | ACCCTGGTCACTGTCTCCTCAGCTAGCACTAAAGGGCCTTCTG |
| | | | TATTTCCCTTGGCCCCGTCCAGCAAATCGACCTCGGGAGGGAC |
| | | | AGCCGCCCTGGGTTGCCTTGTGAAAGATTATTTCCCTGAGCCA |
| | | | GTTACCGTAAGTTGGAACAGTGGGGCGCTGACAAGTGGTGTG |
| | | | CACACGTTTCCTGCCGTCCTGCAATCATCGGGCTTGTATAGCCT |
| | | | CAGCTCTGTGGTCACTGTCCCAAGTTCATCGCTGGGCACTCAG |
| | | | ACGTATATTTGCAATGTGAACCACAAACCTTCAAATACAAAAG |
| | | | TGGATAAACGCGTAGAACCGAAATCGTGTGATAAAACTCACA |
| | | | CATGCCCGCCATGCCCGGCACCTGAACTGCTTGGTGGTCCCAG |
| | | | CGTGTTCCTGTTCCCGCCGAAGCCTAAAGATACTCTAATGATC |
| | | | AGCCGTACGCCAGAGGTGACATGTGTCGTGGTTGACGTGTCCC |
| | | | ACGAAGATCCCGAAGTTAAGTTCAATTGGTATGTTGATGGTGT |
| | | | AGAGGTACACAATGCTAAGACTAAACCTCGCGAGGAGCAGTA |
| | | | CGCCTCGACCTATCGTGTCGTGAGCGTTCTGACCGTCCTTCACC |
| | | | AAGATTGGCTTAACGGCAAAGAATATAAGTGCAAGGTAAGCA |
| | | | ATAAAGCACTTCCGGCCCCAATCGAGAAAACCATTTCCAAGGC |
| | | | CAAAGGTCAACCAAGAGAACCCCAGGTGTATACTCTTCCGCCT |
| | | | TCTCGTGAGGAAATGACTAAAAATCAAGTATCCCTTACGTGTC |
| | | | TGGTTAAAGGTTTTTATCCTAGCGATATTGCTGTTGAATGGGA |
| | | | ATCGAACGGTCAGCCGGAGAATAATTATAAAACAACGCCACC |
| | | | CGTCCTGGATAGCGACGGCTCATTTTTTCTGTATAGCAAACTG |
| | | | ACTGTAGATAAATCACGGTGGCAGCAGGGCAATGTATTCAGTT |
| | | | GCTCCGTTATGCATGAAGCGTTACATAATCACTACACGCAGAA |
| | | | ATCTCTTAGTCTTTCACCCGGT |
| 1376 | ATX-P-3412 | HC IgG1 Fc nt | CAGGTGCAGCTGCAGGAGTCGGGCCCAGGACTGGTGAAGCCT |
| | | | TCGGGGACCCTGTCCCTCACCTGCGCTGTCTCTGGTGGCTCCAT |
| | | | CAGCAGTAGTACCTGGTGGAGTTGGGTCCGCCAGCCCCCAGG |
| | | | GAAGGGGCTGGAGTGGATTGGGGAAATCTATCATAGTGGGAG |
| | | | CACCAACTATAACCCGTCCCTCAAGAGTCGAGTCACCATATCA |
| | | | CTAGACAAGTCCAAGAACCAGTTTTCCCTGAAGCTGAGCTCTG |
| | | | TGACCGCCGCGGACACGGCCGTGTATTACTGTGCGATTAGTTT |
| | | | ATACAACTGGAACGATGCTGCTTTTGATATCTGGGGACAAGGG |
| | | | ACAATGGTCACCGTCTCTTCAGCTAGCACTAAAGGGCCTTCTG |
| | | | TATTTCCCTTGGCCCCGTCCAGCAAATCGACCTCGGGAGGGAC |
| | | | AGCCGCCCTGGGTTGCCTTGTGAAAGATTATTTCCCTGAGCCA |
| | | | GTTACCGTAAGTTGGAACAGTGGGGCGCTGACAAGTGGTGTG |
| | | | CACACGTTTCCTGCCGTCCTGCAATCATCGGGCTTGTATAGCCT |
| | | | CAGCTCTGTGGTCACTGTCCCAAGTTCATCGCTGGGCACTCAG |
| | | | ACGTATATTTGCAATGTGAACCACAAACCTTCAAATACAAAAG |
| | | | TGGATAAACGCGTAGAACCGAAATCGTGTGATAAAACTCACA |
| | | | CATGCCCGCCATGCCCGGCACCTGAACTGCTTGGTGGTCCCAG |
| | | | CGTGTTCCTGTTCCCGCCGAAGCCTAAAGATACTCTAATGATC |
| | | | AGCCGTACGCCAGAGGTGACATGTGTCGTGGTTGACGTGTCCC |
| | | | ACGAAGATCCCGAAGTTAAGTTCAATTGGTATGTTGATGGTGT |
| | | | AGAGGTACACAATGCTAAGACTAAACCTCGCGAGGAGCAGTA |
| | | | CGCCTCGACCTATCGTGTCGTGAGCGTTCTGACCGTCCTTCACC |
| | | | AAGATTGGCTTAACGGCAAAGAATATAAGTGCAAGGTAAGCA |
| | | | ATAAAGCACTTCCGGCCCCAATCGAGAAAACCATTTCCAAGGC |
| | | | CAAAGGTCAACCAAGAGAACCCCAGGTGTATACTCTTCCGCCT |
| | | | TCTCGTGAGGAAATGACTAAAAATCAAGTATCCCTTACGTGTC |
| | | | TGGTTAAAGGTTTTTATCCTAGCGATATTGCTGTTGAATGGGA |
| | | | ATCGAACGGTCAGCCGGAGAATAATTATAAAACAACGCCACC |
| | | | CGTCCTGGATAGCGACGGCTCATTTTTTCTGTATAGCAAACTG |
| | | | ACTGTAGATAAATCACGGTGGCAGCAGGGCAATGTATTCAGTT |
| | | | GCTCCGTTATGCATGAAGCGTTACATAATCACTACACGCAGAA |
| | | | ATCTCTTAGTCTTTCACCCGGT |
| 1377 | ATX-P-3413 | HC IgG1 Fc nt | CAGGTGCAGCTGGTGCAGTCTGGGTCTGAGGTGAAGAAGCCT |
| | | | GGGGCCTCAGTGAAGGTCTCCTGCAAGACTTCTGGATACACGT |
| | | | TCACCGGCTACTATATGCACTGGGTGCGACAGGCCCCTGGACA |
| | | | AGGGCTTGAGTGGATGGGATGGATCAACCCTAACAGTGGTGG |
| | | | CACAACCTATGCACAGAAGTTTCAGGGCAGGGTCACCATGAC |
| | | | CAGGGACACGTCCATCAGCACAGCCTACATGGAGCTGAACAG |
| | | | GCTGAGATCTGACGACACGGCCGTGTATTACTGTGCGAGAGA |
| | | | GGCAGGTGGTTCAGGTGAATACTTCCAGCACTGGGGCCAGGG |
| | | | CACCCCGGTCACCGTCTCTTCAGCTAGCACTAAAGGGCCTTCT |
| | | | GTATTTCCCTTGGCCCCGTCCAGCAAATCGACCTCGGGAGGGA |
| | | | CAGCCGCCCTGGGTTGCCTTGTGAAAGATTATTTCCCTGAGCC |
| | | | AGTTACCGTAAGTTGGAACAGTGGGGCGCTGACAAGTGGTGT |
| | | | GCACACGTTTCCTGCCGTCCTGCAATCATCGGGCTTGTATAGC |
| | | | CTCAGCTCTGTGGTCACTGTCCCAAGTTCATCGCTGGGCACTC |
| | | | AGACGTATATTTGCAATGTGAACCACAAACCTTCAAATACAAA |
| | | | AGTGGATAAACGCGTAGAACCGAAATCGTGTGATAAAACTCA |
| | | | CACATGCCCGCCATGCCCGGCACCTGAACTGCTTGGTGGTCCC |
| | | | AGCGTGTTCCTGTTCCCGCCGAAGCCTAAAGATACTCTAATGA |
| | | | TCAGCCGTACGCCAGAGGTGACATGTGTCGTGGTTGACGTGTC |
| | | | CCACGAAGATCCCGAAGTTAAGTTCAATTGGTATGTTGATGGT |
| | | | GTAGAGGTACACAATGCTAAGACTAAACCTCGCGAGGAGCAG |
| | | | TACGCCTCGACCTATCGTGTCGTGAGCGTTCTGACCGTCCTTCA |
| | | | CCAAGATTGGCTTAACGGCAAAGAATATAAGTGCAAGGTAAG |
| | | | CAATAAAGCACTTCCGGCCCCAATCGAGAAAACCATTTCCAAG |
| | | | GCCAAAGGTCAACCAAGAGAACCCCAGGTGTATACTCTTCCGC |
| | | | CTTCTCGTGAGGAAATGACTAAAAATCAAGTATCCCTTACGTG |
| | | | TCTGGTTAAAGGTTTTTATCCTAGCGATATTGCTGTTGAATGGG |
| | | | AATCGAACGGTCAGCCGGAGAATAATTATAAAACAACGCCAC |
| | | | CCGTCCTGGATAGCGACGGCTCATTTTTTCTGTATAGCAAACT |
| | | | GACTGTAGATAAATCACGGTGGCAGCAGGGCAATGTATTCAG |
| | | | TTGCTCCGTTATGCATGAAGCGTTACATAATCACTACACGCAG |
| | | | AAATCTCTTAGTCTTTCACCCGGT |
| 1378 | ATX-P-3414 | HC IgG1 Fc nt | CAGATCACCTTGAAGGAGTCTGGTCCTACGCTGGTGAAACCCA |
| | | | CACAGACCCTCACGCTGACCTGCACCTTCTCTGGGTTCTCACTC |
| | | | AGCACTAGTGGAGTGGGTGTGGGCTGGATCCGTCAGCCCCCA |
| | | | GGAAAGGCCCTGGAGTGGCTTGCACTCATTTATTGGAATGATG |
| | | | TTAAGTTCTACAGTCCATCTCTGCAGAGCAGGCTCACCATCAC |
| | | | CAAGGACACCTCCAAAAACCAGGTGGTCCTTACACTGACCAA |
| | | | CATGGACCCTGTGGACACAGCCACATATTACTGTGCACACGGG |
| | | | GATAACTGGAACTACCGTGCTTTTGATATCTGGGGACAAGGGA |
| | | | CAATGGTCACCGTCTCTTCAGCTAGCACTAAAGGGCCTTCTGT |
| | | | ATTTCCCTTGGCCCCGTCCAGCAAATCGACCTCGGGAGGGACA |
| | | | GCCGCCCTGGGTTGCCTTGTGAAAGATTATTTCCCTGAGCCAG |
| | | | TTACCGTAAGTTGGAACAGTGGGGCGCTGACAAGTGGTGTGC |
| | | | ACACGTTTCCTGCCGTCCTGCAATCATCGGGCTTGTATAGCCTC |
| | | | AGCTCTGTGGTCACTGTCCCAAGTTCATCGCTGGGCACTCAGA |
| | | | CGTATATTTGCAATGTGAACCACAAACCTTCAAATACAAAAGT |
| | | | GGATAAACGCGTAGAACCGAAATCGTGTGATAAAACTCACAC |
| | | | ATGCCCGCCATGCCCGGCACCTGAACTGCTTGGTGGTCCCAGC |
| | | | GTGTTCCTGTTCCCGCCGAAGCCTAAAGATACTCTAATGATCA |
| | | | GCCGTACGCCAGAGGTGACATGTGTCGTGGTTGACGTGTCCCA |
| | | | CGAAGATCCCGAAGTTAAGTTCAATTGGTATGTTGATGGTGTA |
| | | | GAGGTACACAATGCTAAGACTAAACCTCGCGAGGAGCAGTAC |
| | | | GCCTCGACCTATCGTGTCGTGAGCGTTCTGACCGTCCTTCACC |
| | | | AAGATTGGCTTAACGGCAAAGAATATAAGTGCAAGGTAAGCA |
| | | | ATAAAGCACTTCCGGCCCCAATCGAGAAAACCATTTCCAAGGC |
| | | | CAAAGGTCAACCAAGAGAACCCCAGGTGTATACTCTTCCGCCT |
| | | | TCTCGTGAGGAAATGACTAAAAATCAAGTATCCCTTACGTGTC |
| | | | TGGTTAAAGGTTTTTATCCTAGCGATATTGCTGTTGAATGGGA |
| | | | ATCGAACGGTCAGCCGGAGAATAATTATAAAACAACGCCACC |
| | | | CGTCCTGGATAGCGACGGCTCATTTTTTCTGTATAGCAAACTG |
| | | | ACTGTAGATAAATCACGGTGGCAGCAGGGCAATGTATTCAGTT |
| | | | GCTCCGTTATGCATGAAGCGTTACATAATCACTACACGCAGAA |
| | | | ATCTCTTAGTCTTTCACCCGGT |
| 1379 | ATX-P-3419 | HC IgG1 Fc nt | CAGGTTCAGCTGGTGCAGTCTGGAGCTGAGGTGAAGAAGCCT |
| | | | GGGGCCTCAGTGAAGGTCTCCTGCAAGGCTTCTGGTTACACCT |
| | | | TTACCAGCTATGGTATCAGCTGGGTGCGACAGGCCCCTGGACA |
| | | | AGGGCTTGAGTGGATGGGATGGATCAGCGCTTATAATGGTAA |
| | | | CACACACTATGCACAGAACCTCCAGGGCAGAGTCACCATGAC |
| | | | CACAGACACATCCACGAGCACAGCCTACATGGAGCTGAGGAG |
| | | | CCTGAGATCTGACGACACGGCCGTGTATTACTGTGCGAGGAGT |
| | | | ATAGCAGCCCTTGACTTCTGGGGCCAGGGAACCCCGGTCACCG |
| | | | TCTCCTCAGCTAGCACTAAAGGGCCTTCTGTATTTCCCTTGGCC |
| | | | CCGTCCAGCAAATCGACCTCGGGAGGGACAGCCGCCCTGGGT |
| | | | TGCCTTGTGAAAGATTATTTCCCTGAGCCAGTTACCGTAAGTT |
| | | | GGAACAGTGGGGCGCTGACAAGTGGTGTGCACACGTTTCCTGC |
| | | | CGTCCTGCAATCATCGGGCTTGTATAGCCTCAGCTCTGTGGTC |
| | | | ACTGTCCCAAGTTCATCGCTGGGCACTCAGACGTATATTTGCA |
| | | | ATGTGAACCACAAACCTTCAAATACAAAAGTGGATAAACGCG |
| | | | TAGAACCGAAATCGTGTGATAAAACTCACACATGCCCGCCATG |
| | | | CCCGGCACCTGAACTGCTTGGTGGTCCCAGCGTGTTCCTGTTC |
| | | | CCGCCGAAGCCTAAAGATACTCTAATGATCAGCCGTACGCCAG |
| | | | AGGTGACATGTGTCGTGGTTGACGTGTCCCACGAAGATCCCGA |
| | | | AGTTAAGTTCAATTGGTATGTTGATGGTGTAGAGGTACACAAT |
| | | | GCTAAGACTAAACCTCGCGAGGAGCAGTACGCCTCGACCTATC |
| | | | GTGTCGTGAGCGTTCTGACCGTCCTTCACCAAGATTGGCTTAA |
| | | | CGGCAAAGAATATAAGTGCAAGGTAAGCAATAAAGCACTTCC |
| | | | GGCCCCAATCGAGAAAACCATTTCCAAGGCCAAAGGTCAACC |
| | | | AAGAGAACCCCAGGTGTATACTCTTCCGCCTTCTCGTGAGGAA |
| | | | ATGACTAAAAATCAAGTATCCCTTACGTGTCTGGTTAAAGGTT |
| | | | TTTATCCTAGCGATATTGCTGTTGAATGGGAATCGAACGGTCA |
| | | | GCCGGAGAATAATTATAAAACAACGCCACCCGTCCTGGATAG |
| | | | CGACGGCTCATTTTTTCTGTATAGCAAACTGACTGTAGATAAA |
| | | | TCACGGTGGCAGCAGGGCAATGTATTCAGTTGCTCCGTTATGC |
| | | | ATGAAGCGTTACATAATCACTACACGCAGAAATCTCTTAGTCT |
| | | | TTCACCCGGT |
| 1380 | ATX-P-3421 | HC IgG1 Fc nt | CAGGTGCAGCTGCAGGAGTCGGGCCCAGGACTGGTGAAGCCT |
| | | | TCGGGGACCCTGTCCCTCACCTGCGCTGTCTCTGGTGGCTCCAT |
| | | | CAGCAGTAATAACTGGTGGAGTTGGGTCCGCCAGCCCCCAGG |
| | | | GAAGGGACTGGAGTGGATTGGACAAATCTATCATAGTGAAAA |
| | | | CACCAACTACAACCCGTCCCTCAAGAGTCGAGTCACCATATCA |
| | | | GTAGACAAGTCCAAGAACCAGTTCTCCCTGAAGCTGAGCTCTG |
| | | | TGACCGCCGCGGACACGGCCATCTATTACTGTGCGAGAGTGGA |
| | | | TGACTGGAACTACGGGGGTCACTTTGACTACTGGGGCCAGGG |
| | | | AACCCTGGTCACCGTCTCCTCAGCTAGCACTAAAGGGCCTTCT |
| | | | GTATTTCCCTTGGCCCCGTCCAGCAAATCGACCTCGGGAGGGA |
| | | | CAGCCGCCCTGGGTTGCCTTGTGAAAGATTATTTCCCTGAGCC |
| | | | AGTTACCGTAAGTTGGAACAGTGGGGCGCTGACAAGTGGTGT |
| | | | GCACACGTTTCCTGCCGTCCTGCAATCATCGGGCTTGTATAGC |
| | | | CTCAGCTCTGTGGTCACTGTCCCAAGTTCATCGCTGGGCACTC |
| | | | AGACGTATATTTGCAATGTGAACCACAAACCTTCAAATACAAA |
| | | | AGTGGATAAACGCGTAGAACCGAAATCGTGTGATAAAACTCA |
| | | | CACATGCCCGCCATGCCCGGCACCTGAACTGCTTGGTGGTCCC |
| | | | AGCGTGTTCCTGTTCCCGCCGAAGCCTAAAGATACTCTAATGA |
| | | | TCAGCCGTACGCCAGAGGTGACATGTGTCGTGGTTGACGTGTC |
| | | | CCACGAAGATCCCGAAGTTAAGTTCAATTGGTATGTTGATGGT |
| | | | GTAGAGGTACACAATGCTAAGACTAAACCTCGCGAGGAGCAG |
| | | | TACGCCTCGACCTATCGTGTCGTGAGCGTTCTGACCGTCCTTCA |
| | | | CCAAGATTGGCTTAACGGCAAAGAATATAAGTGCAAGGTAAG |
| | | | CAATAAAGCACTTCCGGCCCCAATCGAGAAAACCATTTCCAAG |
| | | | GCCAAAGGTCAACCAAGAGAACCCCAGGTGTATACTCTTCCGC |
| | | | CTTCTCGTGAGGAAATGACTAAAAATCAAGTATCCCTTACGTG |
| | | | TCTGGTTAAAGGTTTTTATCCTAGCGATATTGCTGTTGAATGGG |
| | | | AATCGAACGGTCAGCCGGAGAATAATTATAAAACAACGCCAC |
| | | | CCGTCCTGGATAGCGACGGCTCATTTTTTCTGTATAGCAAACT |
| | | | GACTGTAGATAAATCACGGTGGCAGCAGGGCAATGTATTCAG |
| | | | TTGCTCCGTTATGCATGAAGCGTTACATAATCACTACACGCAG |
| | | | AAATCTCTTAGTCTTTCACCCGGT |
| 1381 | ATX-P-3428 | HC IgG1 Fc nt | CAGGTTCAGCTGGTGCAGTCTGGAGCTGAGGTGAAGAAGCCT |
| | | | GGGGCCTCAGTTAAGGTCTCCTGCAAGGCTTCTGGTTACACCT |
| | | | TTACCGGCTATGGTATCAGCTGGGTGCGACAGGCCCCTGGACA |
| | | | AGGGCTTGAGTGGATGGGATGGATCAGCGCTTACAATGGTAA |
| | | | CACACACTATGCACAGAACCTCCAGGGCAGAGTCACCATGAC |
| | | | CACCGACACATCCACGAACACAGCCTACATGGAGCTGAGGAG |
| | | | CCTTATATCTGACGACACGGCCTTTTATTATTGTGCGAGAGCG |
| | | | GGACTGGGGATCGACTACTGGGGCCAGGGAACCCTGGTCACT |
| | | | GTCTCCTCAGCTAGCACTAAAGGGCCTTCTGTATTTCCCTTGGC |
| | | | CCCGTCCAGCAAATCGACCTCGGGAGGGACAGCCGCCCTGGG |
| | | | TTGCCTTGTGAAAGATTATTTCCCTGAGCCAGTTACCGTAAGTT |
| | | | GGAACAGTGGGGCGCTGACAAGTGGTGTGCACACGTTTCCTGC |
| | | | CGTCCTGCAATCATCGGGCTTGTATAGCCTCAGCTCTGTGGTC |
| | | | ACTGTCCCAAGTTCATCGCTGGGCACTCAGACGTATATTTGCA |
| | | | ATGTGAACCACAAACCTTCAAATACAAAAGTGGATAAACGCG |
| | | | TAGAACCGAAATCGTGTGATAAAACTCACACATGCCCGCCATG |
| | | | CCCGGCACCTGAACTGCTTGGTGGTCCCAGCGTGTTCCTGTTC |
| | | | CCGCCGAAGCCTAAAGATACTCTAATGATCAGCCGTACGCCAG |
| | | | AGGTGACATGTGTCGTGGTTGACGTGTCCCACGAAGATCCCGA |
| | | | AGTTAAGTTCAATTGGTATGTTGATGGTGTAGAGGTACACAAT |
| | | | GCTAAGACTAAACCTCGCGAGGAGCAGTACGCCTCGACCTATC |
| | | | GTGTCGTGAGCGTTCTGACCGTCCTTCACCAAGATTGGCTTAA |
| | | | CGGCAAAGAATATAAGTGCAAGGTAAGCAATAAAGCACTTCC |
| | | | GGCCCCAATCGAGAAAACCATTTCCAAGGCCAAAGGTCAACC |
| | | | AAGAGAACCCCAGGTGTATACTCTTCCGCCTTCTCGTGAGGAA |
| | | | ATGACTAAAAATCAAGTATCCCTTACGTGTCTGGTTAAAGGTT |
| | | | TTTATCCTAGCGATATTGCTGTTGAATGGGAATCGAACGGTCA |
| | | | GCCGGAGAATAATTATAAAACAACGCCACCCGTCCTGGATAG |
| | | | CGACGGCTCATTTTTTCTGTATAGCAAACTGACTGTAGATAAA |
| | | | TCACGGTGGCAGCAGGGCAATGTATTCAGTTGCTCCGTTATGC |
| | | | ATGAAGCGTTACATAATCACTACACGCAGAAATCTCTTAGTCT |
| | | | TTCACCCGGT |
| 1382 | ATX-P-3430 | HC IgG1 Fc nt | CAGGTGCAGCTGCAGGAGTCGGGCCCAGGACTGGTGAAGCCT |
| | | | TCGGGGACCCTGTCCCTCACCTGCGCTGTCTCTGGTGGCTCCAT |
| | | | CAGCAGTAGTGACTGGTGGAGTTGGGTCCGCCAGTCCCCAGG |
| | | | GAAGGGGCTGGAGTGGATTGGGGAAATCTATCATAGTGGGAG |
| | | | CACCAACTACAACCCGTCCCTCAAGAGTCGAGTCTCCATATCA |
| | | | GTAGACAAGTCCAAGAACCAGTTCTCCCTGAAGCTGAGCTCTG |
| | | | TGACCGCCGCGGACACGGCCGTGTATTACTGTGCGAGAGGGG |
| | | | GGCACATAGGCTACTACTACATGGACGTCTGGGGCAAAGGGA |
| | | | CCACGGTCACCGTCTCCTCAGCTAGCACTAAAGGGCCTTCTGT |
| | | | ATTTCCCTTGGCCCCGTCCAGCAAATCGACCTCGGGAGGGACA |
| | | | GCCGCCCTGGGTTGCCTTGTGAAAGATTATTTCCCTGAGCCAG |
| | | | TTACCGTAAGTTGGAACAGTGGGGCGCTGACAAGTGGTGTGC |
| | | | ACACGTTTCCTGCCGTCCTGCAATCATCGGGCTTGTATAGCCTC |
| | | | AGCTCTGTGGTCACTGTCCCAAGTTCATCGCTGGGCACTCAGA |
| | | | CGTATATTTGCAATGTGAACCACAAACCTTCAAATACAAAAGT |
| | | | GGATAAACGCGTAGAACCGAAATCGTGTGATAAAACTCACAC |
| | | | ATGCCCGCCATGCCCGGCACCTGAACTGCTTGGTGGTCCCAGC |
| | | | GTGTTCCTGTTCCCGCCGAAGCCTAAAGATACTCTAATGATCA |
| | | | GCCGTACGCCAGAGGTGACATGTGTCGTGGTTGACGTGTCCCA |
| | | | CGAAGATCCCGAAGTTAAGTTCAATTGGTATGTTGATGGTGTA |
| | | | GAGGTACACAATGCTAAGACTAAACCTCGCGAGGAGCAGTAC |
| | | | GCCTCGACCTATCGTGTCGTGAGCGTTCTGACCGTCCTTCACC |
| | | | AAGATTGGCTTAACGGCAAAGAATATAAGTGCAAGGTAAGCA |
| | | | ATAAAGCACTTCCGGCCCCAATCGAGAAAACCATTTCCAAGGC |
| | | | CAAAGGTCAACCAAGAGAACCCCAGGTGTATACTCTTCCGCCT |
| | | | TCTCGTGAGGAAATGACTAAAAATCAAGTATCCCTTACGTGTC |
| | | | TGGTTAAAGGTTTTTATCCTAGCGATATTGCTGTTGAATGGGA |
| | | | ATCGAACGGTCAGCCGGAGAATAATTATAAAACAACGCCACC |
| | | | CGTCCTGGATAGCGACGGCTCATTTTTTCTGTATAGCAAACTG |
| | | | ACTGTAGATAAATCACGGTGGCAGCAGGGCAATGTATTCAGTT |
| | | | GCTCCGTTATGCATGAAGCGTTACATAATCACTACACGCAGAA |
| | | | ATCTCTTAGTCTTTCACCCGGT |
| 1383 | ATX-P-3431 | HC IgG1 Fc nt | GAGGTGCAGCTGGTGCAGTCTGGAGCAGAGGTGAAAAAGCCC |
| | | | GGGGAGTCTCTGAAGATCTCCTGTAAGGGTTCTGGATACAGCT |
| | | | TTACCAACTACTGGATCGGCTGGGTGCGCCAGATGCCCGGGAA |
| | | | AGGCCTGGAGTGGATGGGGATCATCTATCCTGGTGACTCTGAT |
| | | | ACCATATACAGCCCGTCCTTCCAAGGCCAGGTCACCTTCTCAG |
| | | | CCGACAAGTCCATCAACACCGCCTACCTGCAGTGGAGCAGCCT |
| | | | GAAGGCCTCGGACACCGCCATGTATTACTGTGCGAGAGGACG |
| | | | TGGATATAGTGGCTACGAAGGTGCTTTTGATATCTGGGGACAA |
| | | | GGGACAATGGTCACCGTCTCTTCAGCTAGCACTAAAGGGCCTT |
| | | | CTGTATTTCCCTTGGCCCCGTCCAGCAAATCGACCTCGGGAGG |
| | | | GACAGCCGCCCTGGGTTGCCTTGTGAAAGATTATTTCCCTGAG |
| | | | CCAGTTACCGTAAGTTGGAACAGTGGGGCGCTGACAAGTGGT |
| | | | GTGCACACGTTTCCTGCCGTCCTGCAATCATCGGGCTTGTATA |
| | | | GCCTCAGCTCTGTGGTCACTGTCCCAAGTTCATCGCTGGGCAC |
| | | | TCAGACGTATATTTGCAATGTGAACCACAAACCTTCAAATACA |
| | | | AAAGTGGATAAACGCGTAGAACCGAAATCGTGTGATAAAACT |
| | | | CACACATGCCCGCCATGCCCGGCACCTGAACTGCTTGGTGGTC |
| | | | CCAGCGTGTTCCTGTTCCCGCCGAAGCCTAAAGATACTCTAAT |
| | | | GATCAGCCGTACGCCAGAGGTGACATGTGTCGTGGTTGACGTG |
| | | | TCCCACGAAGATCCCGAAGTTAAGTTCAATTGGTATGTTGATG |
| | | | GTGTAGAGGTACACAATGCTAAGACTAAACCTCGCGAGGAGC |
| | | | AGTACGCCTCGACCTATCGTGTCGTGAGCGTTCTGACCGTCCT |
| | | | TCACCAAGATTGGCTTAACGGCAAAGAATATAAGTGCAAGGT |
| | | | AAGCAATAAAGCACTTCCGGCCCCAATCGAGAAAACCATTTCC |
| | | | AAGGCCAAAGGTCAACCAAGAGAACCCCAGGTGTATACTCTT |
| | | | CCGCCTTCTCGTGAGGAAATGACTAAAAATCAAGTATCCCTTA |
| | | | CGTGTCTGGTTAAAGGTTTTTATCCTAGCGATATTGCTGTTGAA |
| | | | TGGGAATCGAACGGTCAGCCGGAGAATAATTATAAAACAACG |
| | | | CCACCCGTCCTGGATAGCGACGGCTCATTTTTTCTGTATAGCA |
| | | | AACTGACTGTAGATAAATCACGGTGGCAGCAGGGCAATGTAT |
| | | | TCAGTTGCTCCGTTATGCATGAAGCGTTACATAATCACTACAC |
| | | | GCAGAAATCTCTTAGTCTTTCACCCGGT |
| 1384 | ATX-P-3435 | HC IgG1 Fc nt | CAGGTTCAGCTGGTGCAGTCTGGAGCTGAGGTGAAGAAGCCT |
| | | | GGGGCCTCAGTGAAGGTCTCCTGCAAGGCTTCTGGTTACACCT |
| | | | TTACCAACTATGGTATCAGCTGGGTGCGACAGGCCCCTGGACA |
| | | | AGGGCTTGAGTGGATGGGATGGATCAGCGCTTACAATGGTAA |
| | | | CACACACTATGCACAGAAACTCCAGGGCAGAGTCACCATGAC |
| | | | CACAGACACATCCACGAGCACAGCCTACATGGAGCTGAGGAG |
| | | | CCTGAGATCAGACGACACGGCCGTGTATTACTGTGCGAGAGC |
| | | | GGCAGCAGCCGTTGACTACTGGGGCCAGGGAACCCTGGTCAC |
| | | | CGTCTCTTCAGCTAGCACTAAAGGGCCTTCTGTATTTCCCTTGG |
| | | | CCCCGTCCAGCAAATCGACCTCGGGAGGGACAGCCGCCCTGG |
| | | | GTTGCCTTGTGAAAGATTATTTCCCTGAGCCAGTTACCGTAAG |
| | | | TTGGAACAGTGGGGCGCTGACAAGTGGTGTGCACACGTTTCCT |
| | | | GCCGTCCTGCAATCATCGGGCTTGTATAGCCTCAGCTCTGTGG |
| | | | TCACTGTCCCAAGTTCATCGCTGGGCACTCAGACGTATATTTG |
| | | | CAATGTGAACCACAAACCTTCAAATACAAAAGTGGATAAACG |
| | | | CGTAGAACCGAAATCGTGTGATAAAACTCACACATGCCCGCC |
| | | | ATGCCCGGCACCTGAACTGCTTGGTGGTCCCAGCGTGTTCCTG |
| | | | TTCCCGCCGAAGCCTAAAGATACTCTAATGATCAGCCGTACGC |
| | | | CAGAGGTGACATGTGTCGTGGTTGACGTGTCCCACGAAGATCC |
| | | | CGAAGTTAAGTTCAATTGGTATGTTGATGGTGTAGAGGTACAC |
| | | | AATGCTAAGACTAAACCTCGCGAGGAGCAGTACGCCTCGACC |
| | | | TATCGTGTCGTGAGCGTTCTGACCGTCCTTCACCAAGATTGGC |
| | | | TTAACGGCAAAGAATATAAGTGCAAGGTAAGCAATAAAGCAC |
| | | | TTCCGGCCCCAATCGAGAAAACCATTTCCAAGGCCAAAGGTCA |
| | | | ACCAAGAGAACCCCAGGTGTATACTCTTCCGCCTTCTCGTGAG |
| | | | GAAATGACTAAAAATCAAGTATCCCTTACGTGTCTGGTTAAAG |
| | | | GTTTTTATCCTAGCGATATTGCTGTTGAATGGGAATCGAACGG |
| | | | TCAGCCGGAGAATAATTATAAAACAACGCCACCCGTCCTGGAT |
| | | | AGCGACGGCTCATTTTTTCTGTATAGCAAACTGACTGTAGATA |
| | | | AATCACGGTGGCAGCAGGGCAATGTATTCAGTTGCTCCGTTAT |
| | | | GCATGAAGCGTTACATAATCACTACACGCAGAAATCTCTTAGT |
| | | | CTTTCACCCGGT |
| 1385 | ATX-P-3436 | HC IgG1 Fc nt | CAGGTGCAGCTGCAGGAGTCGGGTCCAGGACTGGTGAAGCCT |
| | | | TCGGAGACCCTGTCCCTCAGTTGCACTGTCTCTGGTGGCTCCGT |
| | | | CAGCAGTGGTAGTTACTACTGGAGCTGGATCCGGCAGCCCCCA |
| | | | GGGAAGGGACTGGAGTGGATTGGGTATATCTATTACAGTGGG |
| | | | AGCACCAAGTACAACCCCTCCCTCAAGAGTCGAGTCACCATAT |
| | | | CAGTAGACACGTCCAAGAACCAGGTCTCCCTGAAGCTGAGTTC |
| | | | TGTGACCGCTGCGGACACGGCCGTGTATTACTGTGCGAGAGAT |
| | | | AAGGGGCACTGGAACTACGGTGCTTTTGATATCTGGGGACAA |
| | | | GGGACAATGGTCACCGTCTCTTCAGCTAGCACTAAAGGGCCTT |
| | | | CTGTATTTCCCTTGGCCCCGTCCAGCAAATCGACCTCGGGAGG |
| | | | GACAGCCGCCCTGGGTTGCCTTGTGAAAGATTATTTCCCTGAG |
| | | | CCAGTTACCGTAAGTTGGAACAGTGGGGCGCTGACAAGTGGT |
| | | | GTGCACACGTTTCCTGCCGTCCTGCAATCATCGGGCTTGTATA |
| | | | GCCTCAGCTCTGTGGTCACTGTCCCAAGTTCATCGCTGGGCAC |
| | | | TCAGACGTATATTTGCAATGTGAACCACAAACCTTCAAATACA |
| | | | AAAGTGGATAAACGCGTAGAACCGAAATCGTGTGATAAAACT |
| | | | CACACATGCCCGCCATGCCCGGCACCTGAACTGCTTGGTGGTC |
| | | | CCAGCGTGTTCCTGTTCCCGCCGAAGCCTAAAGATACTCTAAT |
| | | | GATCAGCCGTACGCCAGAGGTGACATGTGTCGTGGTTGACGTG |
| | | | TCCCACGAAGATCCCGAAGTTAAGTTCAATTGGTATGTTGATG |
| | | | GTGTAGAGGTACACAATGCTAAGACTAAACCTCGCGAGGAGC |
| | | | AGTACGCCTCGACCTATCGTGTCGTGAGCGTTCTGACCGTCCT |
| | | | TCACCAAGATTGGCTTAACGGCAAAGAATATAAGTGCAAGGT |
| | | | AAGCAATAAAGCACTTCCGGCCCCAATCGAGAAAACCATTTCC |
| | | | AAGGCCAAAGGTCAACCAAGAGAACCCCAGGTGTATACTCTT |
| | | | CCGCCTTCTCGTGAGGAAATGACTAAAAATCAAGTATCCCTTA |
| | | | CGTGTCTGGTTAAAGGTTTTTATCCTAGCGATATTGCTGTTGAA |
| | | | TGGGAATCGAACGGTCAGCCGGAGAATAATTATAAAACAACG |
| | | | CCACCCGTCCTGGATAGCGACGGCTCATTTTTTCTGTATAGCA |
| | | | AACTGACTGTAGATAAATCACGGTGGCAGCAGGGCAATGTAT |
| | | | TCAGTTGCTCCGTTATGCATGAAGCGTTACATAATCACTACAC |
| | | | GCAGAAATCTCTTAGTCTTTCACCCGGT |
| 1386 | ATX-P-3437 | HC IgG1 Fc nt | CAGGTGCAGCTGCAGGAGTCGGGCCCAGGACTGGTGAAGCCT |
| | | | TCGGGGACCCTGTCCCTCACCTGCGCTGTCTCTGGTGGCTCCAT |
| | | | CAGCAGTAATAACTGGTGGAGTTGGGTCCGCCAGCCCCCAGG |
| | | | GAAGGGGCTGGAGTGGATTGGGGAAATCTATCATAGTGGAAA |
| | | | TATTAACTACAACCCGTCCCTCAAGAGTCGAGTCACCATATCA |
| | | | GTGGACAAGTCCAAGAACCAGTTCTCCCTGAAGCTGAGCTCTG |
| | | | TGACCGCCGCGGACACGGCCGTGTATTACTGTGCGAGAGGGG |
| | | | GGGAATACGGTGACCCCGTGGGGTACTTCGATCTCTGGGGCCG |
| | | | TGGCACCCTGGTCACTGTCTCCTCAGCTAGCACTAAAGGGCCT |
| | | | TCTGTATTTCCCTTGGCCCCGTCCAGCAAATCGACCTCGGGAG |
| | | | GGACAGCCGCCCTGGGTTGCCTTGTGAAAGATTATTTCCCTGA |
| | | | GCCAGTTACCGTAAGTTGGAACAGTGGGGCGCTGACAAGTGG |
| | | | TGTGCACACGTTTCCTGCCGTCCTGCAATCATCGGGCTTGTATA |
| | | | GCCTCAGCTCTGTGGTCACTGTCCCAAGTTCATCGCTGGGCAC |
| | | | TCAGACGTATATTTGCAATGTGAACCACAAACCTTCAAATACA |
| | | | AAAGTGGATAAACGCGTAGAACCGAAATCGTGTGATAAAACT |
| | | | CACACATGCCCGCCATGCCCGGCACCTGAACTGCTTGGTGGTC |
| | | | CCAGCGTGTTCCTGTTCCCGCCGAAGCCTAAAGATACTCTAAT |
| | | | GATCAGCCGTACGCCAGAGGTGACATGTGTCGTGGTTGACGTG |
| | | | TCCCACGAAGATCCCGAAGTTAAGTTCAATTGGTATGTTGATG |
| | | | GTGTAGAGGTACACAATGCTAAGACTAAACCTCGCGAGGAGC |
| | | | AGTACGCCTCGACCTATCGTGTCGTGAGCGTTCTGACCGTCCT |
| | | | TCACCAAGATTGGCTTAACGGCAAAGAATATAAGTGCAAGGT |
| | | | AAGCAATAAAGCACTTCCGGCCCCAATCGAGAAAACCATTTCC |
| | | | AAGGCCAAAGGTCAACCAAGAGAACCCCAGGTGTATACTCTT |
| | | | CCGCCTTCTCGTGAGGAAATGACTAAAAATCAAGTATCCCTTA |
| | | | CGTGTCTGGTTAAAGGTTTTTATCCTAGCGATATTGCTGTTGAA |
| | | | TGGGAATCGAACGGTCAGCCGGAGAATAATTATAAAACAACG |
| | | | CCACCCGTCCTGGATAGCGACGGCTCATTTTTTCTGTATAGCA |
| | | | AACTGACTGTAGATAAATCACGGTGGCAGCAGGGCAATGTAT |
| | | | TCAGTTGCTCCGTTATGCATGAAGCGTTACATAATCACTACAC |
| | | | GCAGAAATCTCTTAGTCTTTCACCCGGT |
| 1387 | ATX-P-3440 | HC IgG1 Fc nt | CAGGTTCAGCTGGTGCAGTCTGGAGCTGAGGTGAAGAAGCCT |
| | | | GGGGCCTCAGTGAAGGTCTCCTGCAAGGCTTCTGGTTACACCT |
| | | | TTACCACCTATGGTATCAGCTGGGTGCGACAGGCCCCTGGACA |
| | | | AGGGCTTGAGTGGATGGGATGGATCAGCGCTTACAGTGGTAA |
| | | | CACAAACTATGCACAGAAGCTCCAGGGCAGAGTCACCATGAC |
| | | | CACAGACACATCCACGAGCACAGCCTACATGGAGCTGAGGAG |
| | | | CCTGAGATCTGACGACACGGCCGTGTATTACTGTGCGAGAGAG |
| | | | AGAGTCTCCAACTGGGTCTTTGACTTCTGGGGCCAGGGAACCC |
| | | | TGGTCACTGTCTCCTCAGCTAGCACTAAAGGGCCTTCTGTATTT |
| | | | CCCTTGGCCCCGTCCAGCAAATCGACCTCGGGAGGGACAGCC |
| | | | GCCCTGGGTTGCCTTGTGAAAGATTATTTCCCTGAGCCAGTTA |
| | | | CCGTAAGTTGGAACAGTGGGGCGCTGACAAGTGGTGTGCACA |
| | | | CGTTTCCTGCCGTCCTGCAATCATCGGGCTTGTATAGCCTCAGC |
| | | | TCTGTGGTCACTGTCCCAAGTTCATCGCTGGGCACTCAGACGT |
| | | | ATATTTGCAATGTGAACCACAAACCTTCAAATACAAAAGTGGA |
| | | | TAAACGCGTAGAACCGAAATCGTGTGATAAAACTCACACATG |
| | | | CCCGCCATGCCCGGCACCTGAACTGCTTGGTGGTCCCAGCGTG |
| | | | TTCCTGTTCCCGCCGAAGCCTAAAGATACTCTAATGATCAGCC |
| | | | GTACGCCAGAGGTGACATGTGTCGTGGTTGACGTGTCCCACGA |
| | | | AGATCCCGAAGTTAAGTTCAATTGGTATGTTGATGGTGTAGAG |
| | | | GTACACAATGCTAAGACTAAACCTCGCGAGGAGCAGTACGCC |
| | | | TCGACCTATCGTGTCGTGAGCGTTCTGACCGTCCTTCACCAAG |
| | | | ATTGGCTTAACGGCAAAGAATATAAGTGCAAGGTAAGCAATA |
| | | | AAGCACTTCCGGCCCCAATCGAGAAAACCATTTCCAAGGCCA |
| | | | AAGGTCAACCAAGAGAACCCCAGGTGTATACTCTTCCGCCTTC |
| | | | TCGTGAGGAAATGACTAAAAATCAAGTATCCCTTACGTGTCTG |
| | | | GTTAAAGGTTTTTATCCTAGCGATATTGCTGTTGAATGGGAAT |
| | | | CGAACGGTCAGCCGGAGAATAATTATAAAACAACGCCACCCG |
| | | | TCCTGGATAGCGACGGCTCATTTTTTCTGTATAGCAAACTGAC |
| | | | TGTAGATAAATCACGGTGGCAGCAGGGCAATGTATTCAGTTGC |
| | | | TCCGTTATGCATGAAGCGTTACATAATCACTACACGCAGAAAT |
| | | | CTCTTAGTCTTTCACCCGGT |
| 1388 | ATX-P-3442 | HC IgG1 Fc nt | CAGGTGCAGCTGCAGGAGTCGGGCCCAGGACTGGTGAAGCCT |
| | | | TCGGGGACCCTGTCCCTCACCTGCGCTGTCTCTGGTGGTTCCAT |
| | | | CAGCAGTAGTGACTGGTGGAGCTGGGTCCGCCAGCCCCCAGG |
| | | | GAAGGGGCTGGAGTGGATTGGGGAAATCTATCATAGTAGGAA |
| | | | CACCAACTACAACCCGTCCCTCAAGAGTCGAGTCACCATATCA |
| | | | GTAGACAAGTCCAAGAACCAGTTCTCCCTGAAGCTGAGTTCTG |
| | | | TGACCGCCGCGGACACGGCCGTGTATTACTGTGCGAGTGGAG |
| | | | GTGTGGTGGCCGACTACTACATGGACGTCTGGGGCAAAGGGA |
| | | | CCACGGTCACCGTCTCCTCAGCTAGCACTAAAGGGCCTTCTGT |
| | | | ATTTCCCTTGGCCCCGTCCAGCAAATCGACCTCGGGAGGGACA |
| | | | GCCGCCCTGGGTTGCCTTGTGAAAGATTATTTCCCTGAGCCAG |
| | | | TTACCGTAAGTTGGAACAGTGGGGCGCTGACAAGTGGTGTGC |
| | | | ACACGTTTCCTGCCGTCCTGCAATCATCGGGCTTGTATAGCCTC |
| | | | AGCTCTGTGGTCACTGTCCCAAGTTCATCGCTGGGCACTCAGA |
| | | | CGTATATTTGCAATGTGAACCACAAACCTTCAAATACAAAAGT |
| | | | GGATAAACGCGTAGAACCGAAATCGTGTGATAAAACTCACAC |
| | | | ATGCCCGCCATGCCCGGCACCTGAACTGCTTGGTGGTCCCAGC |
| | | | GTGTTCCTGTTCCCGCCGAAGCCTAAAGATACTCTAATGATCA |
| | | | GCCGTACGCCAGAGGTGACATGTGTCGTGGTTGACGTGTCCCA |
| | | | CGAAGATCCCGAAGTTAAGTTCAATTGGTATGTTGATGGTGTA |
| | | | GAGGTACACAATGCTAAGACTAAACCTCGCGAGGAGCAGTAC |
| | | | GCCTCGACCTATCGTGTCGTGAGCGTTCTGACCGTCCTTCACC |
| | | | AAGATTGGCTTAACGGCAAAGAATATAAGTGCAAGGTAAGCA |
| | | | ATAAAGCACTTCCGGCCCCAATCGAGAAAACCATTTCCAAGGC |
| | | | CAAAGGTCAACCAAGAGAACCCCAGGTGTATACTCTTCCGCCT |
| | | | TCTCGTGAGGAAATGACTAAAAATCAAGTATCCCTTACGTGTC |
| | | | TGGTTAAAGGTTTTTATCCTAGCGATATTGCTGTTGAATGGGA |
| | | | ATCGAACGGTCAGCCGGAGAATAATTATAAAACAACGCCACC |
| | | | CGTCCTGGATAGCGACGGCTCATTTTTTCTGTATAGCAAACTG |
| | | | ACTGTAGATAAATCACGGTGGCAGCAGGGCAATGTATTCAGTT |
| | | | GCTCCGTTATGCATGAAGCGTTACATAATCACTACACGCAGAA |
| | | | ATCTCTTAGTCTTTCACCCGGT |
| 1389 | ATX-P-3444 | HC IgG1 Fc nt | GAGGTGCAGCTGGTGGAGTCTGGGGGAGGCCTGGTCAAGCCT |
| | | | GGGGGGTCCCTGAGACTCTCCTGTGCAGCCTCTGGATTCACCT |
| | | | TCAGTAGCTATGGCATGAACTGGGTCCGCCAGGCTCCAGGGA |
| | | | AGGGGCTGGAGTGGGTCTCATCCATTAGTGGTTATGGTAGTTA |
| | | | CATATACTACGCAGCCTCAGTGAAGGGCCGATTCACCATCTCC |
| | | | AGAGACAGCGCCAAGAACTCACTGTATCTGCAAATGAACAGC |
| | | | CTGAGCGCCGAGGACACAGCTGTGTATTACTGTGCGAGAGAA |
| | | | TTAGGTGGGATCTACTACGGGGTAGGGTACTTCGATCTCTGGG |
| | | | GCCGTGGCACCCTGGTCACTGTCTCCTCAGCTAGCACTAAAGG |
| | | | GCCTTCTGTATTTCCCTTGGCCCCGTCCAGCAAATCGACCTCGG |
| | | | GAGGGACAGCCGCCCTGGGTTGCCTTGTGAAAGATTATTTCCC |
| | | | TGAGCCAGTTACCGTAAGTTGGAACAGTGGGGCGCTGACAAG |
| | | | TGGTGTGCACACGTTTCCTGCCGTCCTGCAATCATCGGGCTTGT |
| | | | ATAGCCTCAGCTCTGTGGTCACTGTCCCAAGTTCATCGCTGGG |
| | | | CACTCAGACGTATATTTGCAATGTGAACCACAAACCTTCAAAT |
| | | | ACAAAAGTGGATAAACGCGTAGAACCGAAATCGTGTGATAAA |
| | | | ACTCACACATGCCCGCCATGCCCGGCACCTGAACTGCTTGGTG |
| | | | GTCCCAGCGTGTTCCTGTTCCCGCCGAAGCCTAAAGATACTCT |
| | | | AATGATCAGCCGTACGCCAGAGGTGACATGTGTCGTGGTTGAC |
| | | | GTGTCCCACGAAGATCCCGAAGTTAAGTTCAATTGGTATGTTG |
| | | | ATGGTGTAGAGGTACACAATGCTAAGACTAAACCTCGCGAGG |
| | | | AGCAGTACGCCTCGACCTATCGTGTCGTGAGCGTTCTGACCGT |
| | | | CCTTCACCAAGATTGGCTTAACGGCAAAGAATATAAGTGCAA |
| | | | GGTAAGCAATAAAGCACTTCCGGCCCCAATCGAGAAAACCAT |
| | | | TTCCAAGGCCAAAGGTCAACCAAGAGAACCCCAGGTGTATAC |
| | | | TCTTCCGCCTTCTCGTGAGGAAATGACTAAAAATCAAGTATCC |
| | | | CTTACGTGTCTGGTTAAAGGTTTTTATCCTAGCGATATTGCTGT |
| | | | TGAATGGGAATCGAACGGTCAGCCGGAGAATAATTATAAAAC |
| | | | AACGCCACCCGTCCTGGATAGCGACGGCTCATTTTTTCTGTAT |
| | | | AGCAAACTGACTGTAGATAAATCACGGTGGCAGCAGGGCAAT |
| | | | GTATTCAGTTGCTCCGTTATGCATGAAGCGTTACATAATCACT |
| | | | ACACGCAGAAATCTCTTAGTCTTTCACCCGGT |
| 1390 | ATX-P-3447 | HC IgG1 Fc nt | CAGGTGCAGCTGCAGGAGTCGGGCCCAGGACTGGTGAAGCCT |
| | | | TCGGAGACCCTGTCCCTCACCTGCGCTGTCTCTGGTGGCTCCGT |
| | | | CAGCAGTGGTAATTACTATTGGAGCTGGATCCGGCAGCCCCCA |
| | | | GGGAAGGGACTGGAGTGGATTGGGTATATCTATTCCAGTGGG |
| | | | AGCACCAACTACAACCCCTCCCTCAAGAGTCGAGTCACCATAT |
| | | | CAATAGACACGTCCAAGAACCAGTTCTCCCTGAAGCTGAGCTC |
| | | | TGTGACCGCTGCGGACACGGCCGTGTATTACTGTGCGAGAAGT |
| | | | CCTCGTGGATACAGCTATGGTCCCTTTGCCTACTGGGGCCAGG |
| | | | GGACCCTGGTCACCGTCTCTTCAGCTAGCACTAAAGGGCCTTC |
| | | | TGTATTTCCCTTGGCCCCGTCCAGCAAATCGACCTCGGGAGGG |
| | | | ACAGCCGCCCTGGGTTGCCTTGTGAAAGATTATTTCCCTGAGC |
| | | | CAGTTACCGTAAGTTGGAACAGTGGGGCGCTGACAAGTGGTG |
| | | | TGCACACGTTTCCTGCCGTCCTGCAATCATCGGGCTTGTATAG |
| | | | CCTCAGCTCTGTGGTCACTGTCCCAAGTTCATCGCTGGGCACT |
| | | | CAGACGTATATTTGCAATGTGAACCACAAACCTTCAAATACAA |
| | | | AAGTGGATAAACGCGTAGAACCGAAATCGTGTGATAAAACTC |
| | | | ACACATGCCCGCCATGCCCGGCACCTGAACTGCTTGGTGGTCC |
| | | | CAGCGTGTTCCTGTTCCCGCCGAAGCCTAAAGATACTCTAATG |
| | | | ATCAGCCGTACGCCAGAGGTGACATGTGTCGTGGTTGACGTGT |
| | | | CCCACGAAGATCCCGAAGTTAAGTTCAATTGGTATGTTGATGG |
| | | | TGTAGAGGTACACAATGCTAAGACTAAACCTCGCGAGGAGCA |
| | | | GTACGCCTCGACCTATCGTGTCGTGAGCGTTCTGACCGTCCTTC |
| | | | ACCAAGATTGGCTTAACGGCAAAGAATATAAGTGCAAGGTAA |
| | | | GCAATAAAGCACTTCCGGCCCCAATCGAGAAAACCATTTCCAA |
| | | | GGCCAAAGGTCAACCAAGAGAACCCCAGGTGTATACTCTTCC |
| | | | GCCTTCTCGTGAGGAAATGACTAAAAATCAAGTATCCCTTACG |
| | | | TGTCTGGTTAAAGGTTTTTATCCTAGCGATATTGCTGTTGAATG |
| | | | GGAATCGAACGGTCAGCCGGAGAATAATTATAAAACAACGCC |
| | | | ACCCGTCCTGGATAGCGACGGCTCATTTTTTCTGTATAGCAAA |
| | | | CTGACTGTAGATAAATCACGGTGGCAGCAGGGCAATGTATTCA |
| | | | GTTGCTCCGTTATGCATGAAGCGTTACATAATCACTACACGCA |
| | | | GAAATCTCTTAGTCTTTCACCCGGT |
| 1391 | ATX-P-3448 | HC IgG1 Fc nt | CAGGTGCAGCTGCAGGAGTCGGGCCCAGGACTGGTGAAGCCT |
| | | | TCACAGACCCTGTCCCTCACCTGCACTGTCTCTGGTGGCTCCAT |
| | | | CAGCAGTGGTGGTTACAACTGGAACTGGATCCGCCAGCACCC |
| | | | AGGGAAGGGCCTGGAATGGATTGGGTACATCAATTACAGTGG |
| | | | GAATACCTATTACAACCCGTCCCTCAAGAGTCGAGTTACCATA |
| | | | TCAGTAGACACGTCTAAGAACCAGTTCTCCCTGAAGCTGAGTT |
| | | | CTGTGACTGCCGCGGACACGGCCGTTTATTACTGTGCGAGAGG |
| | | | GCCCCTGGATACAGCTATGGCCCCCTTTGACTACTGGGGCCAG |
| | | | GGAACCCTGGTCACCGTCTCCTCAGCTAGCACTAAAGGGCCTT |
| | | | CTGTATTTCCCTTGGCCCCGTCCAGCAAATCGACCTCGGGAGG |
| | | | GACAGCCGCCCTGGGTTGCCTTGTGAAAGATTATTTCCCTGAG |
| | | | CCAGTTACCGTAAGTTGGAACAGTGGGGCGCTGACAAGTGGT |
| | | | GTGCACACGTTTCCTGCCGTCCTGCAATCATCGGGCTTGTATA |
| | | | GCCTCAGCTCTGTGGTCACTGTCCCAAGTTCATCGCTGGGCAC |
| | | | TCAGACGTATATTTGCAATGTGAACCACAAACCTTCAAATACA |
| | | | AAAGTGGATAAACGCGTAGAACCGAAATCGTGTGATAAAACT |
| | | | CACACATGCCCGCCATGCCCGGCACCTGAACTGCTTGGTGGTC |
| | | | CCAGCGTGTTCCTGTTCCCGCCGAAGCCTAAAGATACTCTAAT |
| | | | GATCAGCCGTACGCCAGAGGTGACATGTGTCGTGGTTGACGTG |
| | | | TCCCACGAAGATCCCGAAGTTAAGTTCAATTGGTATGTTGATG |
| | | | GTGTAGAGGTACACAATGCTAAGACTAAACCTCGCGAGGAGC |
| | | | AGTACGCCTCGACCTATCGTGTCGTGAGCGTTCTGACCGTCCT |
| | | | TCACCAAGATTGGCTTAACGGCAAAGAATATAAGTGCAAGGT |
| | | | AAGCAATAAAGCACTTCCGGCCCCAATCGAGAAAACCATTTCC |
| | | | AAGGCCAAAGGTCAACCAAGAGAACCCCAGGTGTATACTCTT |
| | | | CCGCCTTCTCGTGAGGAAATGACTAAAAATCAAGTATCCCTTA |
| | | | CGTGTCTGGTTAAAGGTTTTTATCCTAGCGATATTGCTGTTGAA |
| | | | TGGGAATCGAACGGTCAGCCGGAGAATAATTATAAAACAACG |
| | | | CCACCCGTCCTGGATAGCGACGGCTCATTTTTTCTGTATAGCA |
| | | | AACTGACTGTAGATAAATCACGGTGGCAGCAGGGCAATGTAT |
| | | | TCAGTTGCTCCGTTATGCATGAAGCGTTACATAATCACTACAC |
| | | | GCAGAAATCTCTTAGTCTTTCACCCGGT |
| 1392 | ATX-P-3449 | HC IgG1 Fc nt | CAGGTGCAGCTGCAGGAGTCGGGCCCAGGACTGGTGAAGCCT |
| | | | TCGGAGACCCTGTCCCTCACCTGTACTGTCTCTGGTGACTCCAT |
| | | | CAGTAGTTACTACTGGAGTTGGATCCGGCAGCCCCCAGGGAA |
| | | | GGGACTGGAGTGGATTGGATATATCTATTATAGTGGGTTCACC |
| | | | AAGTACAACCCCTCCCTCAAGAGTCGAGTCACCATTTCAGTAG |
| | | | ACACGTCCAAGAACCAGTTCTCCCTGAGGCTGAGCTCTGTGAC |
| | | | CGCTGCGGACACGGCCGTGTATTACTGTGCGAGCGTCGATTCA |
| | | | AAGTGGAACTACGGGTCTTTTCATATCTGGGGACAAGGGACA |
| | | | ATGGTCACCGTCTCTTCAGCTAGCACTAAAGGGCCTTCTGTAT |
| | | | TTCCCTTGGCCCCGTCCAGCAAATCGACCTCGGGAGGGACAGC |
| | | | CGCCCTGGGTTGCCTTGTGAAAGATTATTTCCCTGAGCCAGTT |
| | | | ACCGTAAGTTGGAACAGTGGGGCGCTGACAAGTGGTGTGCAC |
| | | | ACGTTTCCTGCCGTCCTGCAATCATCGGGCTTGTATAGCCTCA |
| | | | GCTCTGTGGTCACTGTCCCAAGTTCATCGCTGGGCACTCAGAC |
| | | | GTATATTTGCAATGTGAACCACAAACCTTCAAATACAAAAGTG |
| | | | GATAAACGCGTAGAACCGAAATCGTGTGATAAAACTCACACA |
| | | | TGCCCGCCATGCCCGGCACCTGAACTGCTTGGTGGTCCCAGCG |
| | | | TGTTCCTGTTCCCGCCGAAGCCTAAAGATACTCTAATGATCAG |
| | | | CCGTACGCCAGAGGTGACATGTGTCGTGGTTGACGTGTCCCAC |
| | | | GAAGATCCCGAAGTTAAGTTCAATTGGTATGTTGATGGTGTAG |
| | | | AGGTACACAATGCTAAGACTAAACCTCGCGAGGAGCAGTACG |
| | | | CCTCGACCTATCGTGTCGTGAGCGTTCTGACCGTCCTTCACCA |
| | | | AGATTGGCTTAACGGCAAAGAATATAAGTGCAAGGTAAGCAA |
| | | | TAAAGCACTTCCGGCCCCAATCGAGAAAACCATTTCCAAGGCC |
| | | | AAAGGTCAACCAAGAGAACCCCAGGTGTATACTCTTCCGCCTT |
| | | | CTCGTGAGGAAATGACTAAAAATCAAGTATCCCTTACGTGTCT |
| | | | GGTTAAAGGTTTTTATCCTAGCGATATTGCTGTTGAATGGGAA |
| | | | TCGAACGGTCAGCCGGAGAATAATTATAAAACAACGCCACCC |
| | | | GTCCTGGATAGCGACGGCTCATTTTTTCTGTATAGCAAACTGA |
| | | | CTGTAGATAAATCACGGTGGCAGCAGGGCAATGTATTCAGTTG |
| | | | CTCCGTTATGCATGAAGCGTTACATAATCACTACACGCAGAAA |
| | | | TCTCTTAGTCTTTCACCCGGT |
| 1393 | ATX-P-3450 | HC IgG1 Fc nt | CAGGTGCAGCTGCAGGAGTCGGGCCCAGGGCTGGTGAAGCCT |
| | | | TCGGAGACCCTGTCCCTCACCTGCTCTGTCTCTGGTGACTCCGT |
| | | | CAGCAATAATCGTTATTATTGGAGCTGGATTCGGCAGCCCCCA |
| | | | GGGAAGGGACTGGAGTGGATTGGGTATATCTATTACAGTGGG |
| | | | AGCACCAACTACAACCCCTCCCTCAAGAGTCGAGTCACCATAT |
| | | | CAGTAGACACGTCCAAGAACCAGTTGTCCCTGAACCTGAGTTC |
| | | | TGTGACCGCTGCGGACACGGCCGTGTATTACTGTGCGAGAGAT |
| | | | CGCCCATCCCGGTATAAGTGGAATTACGATGCTTTTGCTATCT |
| | | | GGGGACAAGGGACAATGGTCACCGTCTCTTCAGCTAGCACTA |
| | | | AAGGGCCTTCTGTATTTCCCTTGGCCCCGTCCAGCAAATCGAC |
| | | | CTCGGGAGGGACAGCCGCCCTGGGTTGCCTTGTGAAAGATTAT |
| | | | TTCCCTGAGCCAGTTACCGTAAGTTGGAACAGTGGGGCGCTGA |
| | | | CAAGTGGTGTGCACACGTTTCCTGCCGTCCTGCAATCATCGGG |
| | | | CTTGTATAGCCTCAGCTCTGTGGTCACTGTCCCAAGTTCATCGC |
| | | | TGGGCACTCAGACGTATATTTGCAATGTGAACCACAAACCTTC |
| | | | AAATACAAAAGTGGATAAACGCGTAGAACCGAAATCGTGTGA |
| | | | TAAAACTCACACATGCCCGCCATGCCCGGCACCTGAACTGCTT |
| | | | GGTGGTCCCAGCGTGTTCCTGTTCCCGCCGAAGCCTAAAGATA |
| | | | CTCTAATGATCAGCCGTACGCCAGAGGTGACATGTGTCGTGGT |
| | | | TGACGTGTCCCACGAAGATCCCGAAGTTAAGTTCAATTGGTAT |
| | | | GTTGATGGTGTAGAGGTACACAATGCTAAGACTAAACCTCGCG |
| | | | AGGAGCAGTACGCCTCGACCTATCGTGTCGTGAGCGTTCTGAC |
| | | | CGTCCTTCACCAAGATTGGCTTAACGGCAAAGAATATAAGTGC |
| | | | AAGGTAAGCAATAAAGCACTTCCGGCCCCAATCGAGAAAACC |
| | | | ATTTCCAAGGCCAAAGGTCAACCAAGAGAACCCCAGGTGTAT |
| | | | ACTCTTCCGCCTTCTCGTGAGGAAATGACTAAAAATCAAGTAT |
| | | | CCCTTACGTGTCTGGTTAAAGGTTTTTATCCTAGCGATATTGCT |
| | | | GTTGAATGGGAATCGAACGGTCAGCCGGAGAATAATTATAAA |
| | | | ACAACGCCACCCGTCCTGGATAGCGACGGCTCATTTTTTCTGT |
| | | | ATAGCAAACTGACTGTAGATAAATCACGGTGGCAGCAGGGCA |
| | | | ATGTATTCAGTTGCTCCGTTATGCATGAAGCGTTACATAATCA |
| | | | CTACACGCAGAAATCTCTTAGTCTTTCACCCGGT |
| 1394 | ATX-P-3451 | HC IgG1 Fc nt | CAGGTGCAGCTACAGCAGTGGGGCGCAGGACTGTTGAAGCCT |
| | | | TCGGAGACCCTGTCCCTCACCTGCGCTGTCTATGGTGGGTCCTT |
| | | | CAGTGATTACTACTGGACCTGGATCCGCCAGCCCCCAGGGAAG |
| | | | GGGCTGGAGTGGATTGGTGAAGTCAATCATATTGGAAGCACC |
| | | | AACTACAACCCGTCCCTCAAGAGTCGAGTCACCATATCAGTAG |
| | | | ACACGTCCAAGAACCAGTTCTCCCTGAACCTGAGCTCTGTGAC |
| | | | CGCCGCGGACACGGCTGTGTATTACTGTGCGAAGTATAGCACT |
| | | | TCCTGGTACGGCTGGTTCGACCCCTGGGGCCAGGGAACCCTGG |
| | | | TCACTGTCTCCTCAGCTAGCACTAAAGGGCCTTCTGTATTTCCC |
| | | | TTGGCCCCGTCCAGCAAATCGACCTCGGGAGGGACAGCCGCC |
| | | | CTGGGTTGCCTTGTGAAAGATTATTTCCCTGAGCCAGTTACCG |
| | | | TAAGTTGGAACAGTGGGGCGCTGACAAGTGGTGTGCACACGT |
| | | | TTCCTGCCGTCCTGCAATCATCGGGCTTGTATAGCCTCAGCTCT |
| | | | GTGGTCACTGTCCCAAGTTCATCGCTGGGCACTCAGACGTATA |
| | | | TTTGCAATGTGAACCACAAACCTTCAAATACAAAAGTGGATAA |
| | | | ACGCGTAGAACCGAAATCGTGTGATAAAACTCACACATGCCC |
| | | | GCCATGCCCGGCACCTGAACTGCTTGGTGGTCCCAGCGTGTTC |
| | | | CTGTTCCCGCCGAAGCCTAAAGATACTCTAATGATCAGCCGTA |
| | | | CGCCAGAGGTGACATGTGTCGTGGTTGACGTGTCCCACGAAGA |
| | | | TCCCGAAGTTAAGTTCAATTGGTATGTTGATGGTGTAGAGGTA |
| | | | CACAATGCTAAGACTAAACCTCGCGAGGAGCAGTACGCCTCG |
| | | | ACCTATCGTGTCGTGAGCGTTCTGACCGTCCTTCACCAAGATT |
| | | | GGCTTAACGGCAAAGAATATAAGTGCAAGGTAAGCAATAAAG |
| | | | CACTTCCGGCCCCAATCGAGAAAACCATTTCCAAGGCCAAAG |
| | | | GTCAACCAAGAGAACCCCAGGTGTATACTCTTCCGCCTTCTCG |
| | | | TGAGGAAATGACTAAAAATCAAGTATCCCTTACGTGTCTGGTT |
| | | | AAAGGTTTTTATCCTAGCGATATTGCTGTTGAATGGGAATCGA |
| | | | ACGGTCAGCCGGAGAATAATTATAAAACAACGCCACCCGTCC |
| | | | TGGATAGCGACGGCTCATTTTTTCTGTATAGCAAACTGACTGT |
| | | | AGATAAATCACGGTGGCAGCAGGGCAATGTATTCAGTTGCTCC |
| | | | GTTATGCATGAAGCGTTACATAATCACTACACGCAGAAATCTC |
| | | | TTAGTCTTTCACCCGGT |
| 1395 | ATX-P-3453 | HC IgG1 Fc nt | CAGGTGCAGCTGCAGGAGTCGGGCCCAGGGCTGGTGAAGCCT |
| | | | TCGGGGACCCTGTCCCTCACCTGCGCTGTCTCTGGTGACTCCAT |
| | | | CAGCAGTAATAACTGGTGGAGTTGGTTCCGCCAGCCCCCAGGG |
| | | | AAGGGACTGGAGTGGATTGGGAGAATCTATCATAGTGGGACC |
| | | | ACCAACTACAACCCGTCCCTCGAGAGTCGAGTCACCATATCAG |
| | | | TAGACAACTCCAGGAACCAGTTCTCCCTGAAACTGAGCTCTGT |
| | | | GACCGCCGCGGACACGGCCGTGTATTACTGTGCGAGAGGCGA |
| | | | GGAGTGGGAGCTGCGGGGAGGTGTTTTTGATATCTGGGGACA |
| | | | AGGGACAATGGTCACCGTCTCTTCAGCTAGCACTAAAGGGCCT |
| | | | TCTGTATTTCCCTTGGCCCCGTCCAGCAAATCGACCTCGGGAG |
| | | | GGACAGCCGCCCTGGGTTGCCTTGTGAAAGATTATTTCCCTGA |
| | | | GCCAGTTACCGTAAGTTGGAACAGTGGGGCGCTGACAAGTGG |
| | | | TGTGCACACGTTTCCTGCCGTCCTGCAATCATCGGGCTTGTATA |
| | | | GCCTCAGCTCTGTGGTCACTGTCCCAAGTTCATCGCTGGGCAC |
| | | | TCAGACGTATATTTGCAATGTGAACCACAAACCTTCAAATACA |
| | | | AAAGTGGATAAACGCGTAGAACCGAAATCGTGTGATAAAACT |
| | | | CACACATGCCCGCCATGCCCGGCACCTGAACTGCTTGGTGGTC |
| | | | CCAGCGTGTTCCTGTTCCCGCCGAAGCCTAAAGATACTCTAAT |
| | | | GATCAGCCGTACGCCAGAGGTGACATGTGTCGTGGTTGACGTG |
| | | | TCCCACGAAGATCCCGAAGTTAAGTTCAATTGGTATGTTGATG |
| | | | GTGTAGAGGTACACAATGCTAAGACTAAACCTCGCGAGGAGC |
| | | | AGTACGCCTCGACCTATCGTGTCGTGAGCGTTCTGACCGTCCT |
| | | | TCACCAAGATTGGCTTAACGGCAAAGAATATAAGTGCAAGGT |
| | | | AAGCAATAAAGCACTTCCGGCCCCAATCGAGAAAACCATTTCC |
| | | | AAGGCCAAAGGTCAACCAAGAGAACCCCAGGTGTATACTCTT |
| | | | CCGCCTTCTCGTGAGGAAATGACTAAAAATCAAGTATCCCTTA |
| | | | CGTGTCTGGTTAAAGGTTTTTATCCTAGCGATATTGCTGTTGAA |
| | | | TGGGAATCGAACGGTCAGCCGGAGAATAATTATAAAACAACG |
| | | | CCACCCGTCCTGGATAGCGACGGCTCATTTTTTCTGTATAGCA |
| | | | AACTGACTGTAGATAAATCACGGTGGCAGCAGGGCAATGTAT |
| | | | TCAGTTGCTCCGTTATGCATGAAGCGTTACATAATCACTACAC |
| | | | GCAGAAATCTCTTAGTCTTTCACCCGGT |
| 1396 | ATX-P-3454 | HC IgG1 Fc nt | CAGGTGCAGCTGGTGCAATCTGGGCCTGAGTTGAAGAAGCCT |
| | | | GGGGCCTCAGTAAAGGTTTCCTGCAAGGCTTCTGGATACACCT |
| | | | TCACTAACTATGCTGTGAATTGGGTGCGACAGGCCCCTGGACA |
| | | | AGGGCTTGAGTGGATGGGATGGATCAACACCAACACTGGGCA |
| | | | CCCAACGTATGCCCAGGGCTTCACAGGACGGTTTGTCTTCTCC |
| | | | TTGGACACCTCTGTCAGTACGGCATATCTGCAGATCAGCAGCC |
| | | | TAAAGGCTGAGGACACTGCCGTTTATTACTGTGCGAGAGACAG |
| | | | CAGCAGCTGGGGCTACTGGGGCCAGGGAACCCTGGTCACTGT |
| | | | CTCCTCAGCTAGCACTAAAGGGCCTTCTGTATTTCCCTTGGCCC |
| | | | CGTCCAGCAAATCGACCTCGGGAGGGACAGCCGCCCTGGGTT |
| | | | GCCTTGTGAAAGATTATTTCCCTGAGCCAGTTACCGTAAGTTG |
| | | | GAACAGTGGGGCGCTGACAAGTGGTGTGCACACGTTTCCTGCC |
| | | | GTCCTGCAATCATCGGGCTTGTATAGCCTCAGCTCTGTGGTCA |
| | | | CTGTCCCAAGTTCATCGCTGGGCACTCAGACGTATATTTGCAA |
| | | | TGTGAACCACAAACCTTCAAATACAAAAGTGGATAAACGCGT |
| | | | AGAACCGAAATCGTGTGATAAAACTCACACATGCCCGCCATG |
| | | | CCCGGCACCTGAACTGCTTGGTGGTCCCAGCGTGTTCCTGTTC |
| | | | CCGCCGAAGCCTAAAGATACTCTAATGATCAGCCGTACGCCAG |
| | | | AGGTGACATGTGTCGTGGTTGACGTGTCCCACGAAGATCCCGA |
| | | | AGTTAAGTTCAATTGGTATGTTGATGGTGTAGAGGTACACAAT |
| | | | GCTAAGACTAAACCTCGCGAGGAGCAGTACGCCTCGACCTATC |
| | | | GTGTCGTGAGCGTTCTGACCGTCCTTCACCAAGATTGGCTTAA |
| | | | CGGCAAAGAATATAAGTGCAAGGTAAGCAATAAAGCACTTCC |
| | | | GGCCCCAATCGAGAAAACCATTTCCAAGGCCAAAGGTCAACC |
| | | | AAGAGAACCCCAGGTGTATACTCTTCCGCCTTCTCGTGAGGAA |
| | | | ATGACTAAAAATCAAGTATCCCTTACGTGTCTGGTTAAAGGTT |
| | | | TTTATCCTAGCGATATTGCTGTTGAATGGGAATCGAACGGTCA |
| | | | GCCGGAGAATAATTATAAAACAACGCCACCCGTCCTGGATAG |
| | | | CGACGGCTCATTTTTTCTGTATAGCAAACTGACTGTAGATAAA |
| | | | TCACGGTGGCAGCAGGGCAATGTATTCAGTTGCTCCGTTATGC |
| | | | ATGAAGCGTTACATAATCACTACACGCAGAAATCTCTTAGTCT |
| | | | TTCACCCGGT |
| 1397 | ATX-P-3455 | HC IgG1 Fc nt | CAGGTGCAGCTGCAGGAGTCGGGCCCAGGACTGGTGACGCCT |
| | | | TCGGGGACCCTGTCCCTCACCTGCGCTGTCTCTGGTGACTCCAT |
| | | | CAGTAGTGATAACTGGTGGAGTTGGGTCCGCCAGCCCCCAGG |
| | | | GAAGGGACTGGAGTGGATTGGGGAAATCTATCACAGTGAAAA |
| | | | CACCAACTACAACCCGTCCCTCAAGAGTCGAGTCACCATATCA |
| | | | GTAGACAAGTCCAAGAACCAGTTCTCCCTGAGGCTGAACTCTG |
| | | | TGACCGCCGCGGACACGGCCATGTATTACTGTGCGAGAGGGA |
| | | | GGGAGCTAACTGGCCTCTTTGACTACTGGGGCCAGGGAACCCT |
| | | | GGTCACCGTCTCCTCAGCTAGCACTAAAGGGCCTTCTGTATTT |
| | | | CCCTTGGCCCCGTCCAGCAAATCGACCTCGGGAGGGACAGCC |
| | | | GCCCTGGGTTGCCTTGTGAAAGATTATTTCCCTGAGCCAGTTA |
| | | | CCGTAAGTTGGAACAGTGGGGCGCTGACAAGTGGTGTGCACA |
| | | | CGTTTCCTGCCGTCCTGCAATCATCGGGCTTGTATAGCCTCAGC |
| | | | TCTGTGGTCACTGTCCCAAGTTCATCGCTGGGCACTCAGACGT |
| | | | ATATTTGCAATGTGAACCACAAACCTTCAAATACAAAAGTGGA |
| | | | TAAACGCGTAGAACCGAAATCGTGTGATAAAACTCACACATG |
| | | | CCCGCCATGCCCGGCACCTGAACTGCTTGGTGGTCCCAGCGTG |
| | | | TTCCTGTTCCCGCCGAAGCCTAAAGATACTCTAATGATCAGCC |
| | | | GTACGCCAGAGGTGACATGTGTCGTGGTTGACGTGTCCCACGA |
| | | | AGATCCCGAAGTTAAGTTCAATTGGTATGTTGATGGTGTAGAG |
| | | | GTACACAATGCTAAGACTAAACCTCGCGAGGAGCAGTACGCC |
| | | | TCGACCTATCGTGTCGTGAGCGTTCTGACCGTCCTTCACCAAG |
| | | | ATTGGCTTAACGGCAAAGAATATAAGTGCAAGGTAAGCAATA |
| | | | AAGCACTTCCGGCCCCAATCGAGAAAACCATTTCCAAGGCCA |
| | | | AAGGTCAACCAAGAGAACCCCAGGTGTATACTCTTCCGCCTTC |
| | | | TCGTGAGGAAATGACTAAAAATCAAGTATCCCTTACGTGTCTG |
| | | | GTTAAAGGTTTTTATCCTAGCGATATTGCTGTTGAATGGGAAT |
| | | | CGAACGGTCAGCCGGAGAATAATTATAAAACAACGCCACCCG |
| | | | TCCTGGATAGCGACGGCTCATTTTTTCTGTATAGCAAACTGAC |
| | | | TGTAGATAAATCACGGTGGCAGCAGGGCAATGTATTCAGTTGC |
| | | | TCCGTTATGCATGAAGCGTTACATAATCACTACACGCAGAAAT |
| | | | CTCTTAGTCTTTCACCCGGT |
| 1398 | ATX-P-3456 | HC IgG1 Fc nt | CAGGTGCAGCTGCAGGAGTCGGGCCCAGGACTGGTGAAGCCT |
| | | | TCGGGGACCCTGTCCCTCACCTGCGCTGTCTCTGGTGGCTCCAT |
| | | | CAGCAGTAATAACTGGTGGAGTTGGGTCCGCCAGCCCCCAGG |
| | | | AAAGGGACTGGAATGGATTGGGGACATCTATCATAGTGGAAA |
| | | | CACCAACTACAACCCGTCCCTCAAGAGTCGAGTCACCCTATCA |
| | | | GTAGACATGTCCAAGAACCAGTTCTCCCTGAAACTGAACTCTG |
| | | | TGACCGCCGCGGACACGGCCGTGTATTACTGTGCGAGAGGAG |
| | | | GTATAGCAGTGACTGCCTACTTTGACTACTGGGGCCAGGGAAC |
| | | | CCTGGTCACCGTCTCCTCAGCTAGCACTAAAGGGCCTTCTGTA |
| | | | TTTCCCTTGGCCCCGTCCAGCAAATCGACCTCGGGAGGGACAG |
| | | | CCGCCCTGGGTTGCCTTGTGAAAGATTATTTCCCTGAGCCAGT |
| | | | TACCGTAAGTTGGAACAGTGGGGCGCTGACAAGTGGTGTGCA |
| | | | CACGTTTCCTGCCGTCCTGCAATCATCGGGCTTGTATAGCCTCA |
| | | | GCTCTGTGGTCACTGTCCCAAGTTCATCGCTGGGCACTCAGAC |
| | | | GTATATTTGCAATGTGAACCACAAACCTTCAAATACAAAAGTG |
| | | | GATAAACGCGTAGAACCGAAATCGTGTGATAAAACTCACACA |
| | | | TGCCCGCCATGCCCGGCACCTGAACTGCTTGGTGGTCCCAGCG |
| | | | TGTTCCTGTTCCCGCCGAAGCCTAAAGATACTCTAATGATCAG |
| | | | CCGTACGCCAGAGGTGACATGTGTCGTGGTTGACGTGTCCCAC |
| | | | GAAGATCCCGAAGTTAAGTTCAATTGGTATGTTGATGGTGTAG |
| | | | AGGTACACAATGCTAAGACTAAACCTCGCGAGGAGCAGTACG |
| | | | CCTCGACCTATCGTGTCGTGAGCGTTCTGACCGTCCTTCACCA |
| | | | AGATTGGCTTAACGGCAAAGAATATAAGTGCAAGGTAAGCAA |
| | | | TAAAGCACTTCCGGCCCCAATCGAGAAAACCATTTCCAAGGCC |
| | | | AAAGGTCAACCAAGAGAACCCCAGGTGTATACTCTTCCGCCTT |
| | | | CTCGTGAGGAAATGACTAAAAATCAAGTATCCCTTACGTGTCT |
| | | | GGTTAAAGGTTTTTATCCTAGCGATATTGCTGTTGAATGGGAA |
| | | | TCGAACGGTCAGCCGGAGAATAATTATAAAACAACGCCACCC |
| | | | GTCCTGGATAGCGACGGCTCATTTTTTCTGTATAGCAAACTGA |
| | | | CTGTAGATAAATCACGGTGGCAGCAGGGCAATGTATTCAGTTG |
| | | | CTCCGTTATGCATGAAGCGTTACATAATCACTACACGCAGAAA |
| | | | TCTCTTAGTCTTTCACCCGGT |
| 1399 | ATX-P-3458 | HC IgG1 Fc nt | CAGGTGCAGCTGGTGCAGTCTGGGGCTGAGGTGAAGAAGCCT |
| | | | GGGGCCTCAGTGAAGGTCTCCTGCAAGGCTTCTGGATACACCT |
| | | | TCACCGGCTACTATTTGCACTGGGTGCGACAGGCCCCTGGACA |
| | | | AGGGCTTGAGTGGATGGGATGGATCAACCCTCACAGTGGTGG |
| | | | CACAATCTATGCACAGAAGTTTCAGGACAGGGTCACCATGACC |
| | | | AGGGACACGTCCATCAGCACAGCCTACATGGAGCTGAGCAGG |
| | | | CTGAGATCTGACGACACGGCCGTGTATTACTGTGCGAACTGGA |
| | | | ACTCCGGGGACTCCTACTACTACTACATGGACGTCTGGGGCAA |
| | | | AGGGACCACGGTCACCGTCTCCTCAGCTAGCACTAAAGGGCCT |
| | | | TCTGTATTTCCCTTGGCCCCGTCCAGCAAATCGACCTCGGGAG |
| | | | GGACAGCCGCCCTGGGTTGCCTTGTGAAAGATTATTTCCCTGA |
| | | | GCCAGTTACCGTAAGTTGGAACAGTGGGGCGCTGACAAGTGG |
| | | | TGTGCACACGTTTCCTGCCGTCCTGCAATCATCGGGCTTGTATA |
| | | | GCCTCAGCTCTGTGGTCACTGTCCCAAGTTCATCGCTGGGCAC |
| | | | TCAGACGTATATTTGCAATGTGAACCACAAACCTTCAAATACA |
| | | | AAAGTGGATAAACGCGTAGAACCGAAATCGTGTGATAAAACT |
| | | | CACACATGCCCGCCATGCCCGGCACCTGAACTGCTTGGTGGTC |
| | | | CCAGCGTGTTCCTGTTCCCGCCGAAGCCTAAAGATACTCTAAT |
| | | | GATCAGCCGTACGCCAGAGGTGACATGTGTCGTGGTTGACGTG |
| | | | TCCCACGAAGATCCCGAAGTTAAGTTCAATTGGTATGTTGATG |
| | | | GTGTAGAGGTACACAATGCTAAGACTAAACCTCGCGAGGAGC |
| | | | AGTACGCCTCGACCTATCGTGTCGTGAGCGTTCTGACCGTCCT |
| | | | TCACCAAGATTGGCTTAACGGCAAAGAATATAAGTGCAAGGT |
| | | | AAGCAATAAAGCACTTCCGGCCCCAATCGAGAAAACCATTTCC |
| | | | AAGGCCAAAGGTCAACCAAGAGAACCCCAGGTGTATACTCTT |
| | | | CCGCCTTCTCGTGAGGAAATGACTAAAAATCAAGTATCCCTTA |
| | | | CGTGTCTGGTTAAAGGTTTTTATCCTAGCGATATTGCTGTTGAA |
| | | | TGGGAATCGAACGGTCAGCCGGAGAATAATTATAAAACAACG |
| | | | CCACCCGTCCTGGATAGCGACGGCTCATTTTTTCTGTATAGCA |
| | | | AACTGACTGTAGATAAATCACGGTGGCAGCAGGGCAATGTAT |
| | | | TCAGTTGCTCCGTTATGCATGAAGCGTTACATAATCACTACAC |
| | | | GCAGAAATCTCTTAGTCTTTCACCCGGT |
| 1400 | ATX-P-3459 | HC IgG1 Fc nt | CAGGTGCAGCTGCAGGAGTCGGGCCCAGGACTGGTGAAGCCT |
| | | | TCGGGGACCCTGTCCCTCACCTGCGCTGTCTCTGGTGGTTCCAT |
| | | | CAGCAGTGATAACTGGTGGAATTGGGTCCGCCAGCCCCCAGG |
| | | | GAAGGGGCTGGAGTGGATTGGAAAAATCTATCATAGTGGGAA |
| | | | CACCAACTACAACCCGTCCCTCAAGAGTCGAGTCACCATATCA |
| | | | GTAGACGAGTCCAAGAACCAGTTCTCCCTGAGGCTGTACTCTG |
| | | | TGACCGCCGCGGACACGGCCGTGTATTACTGTGCGAGAGGGG |
| | | | TCGATTTTTGGAGTGGTTCCCACATGGACGTCTGGGGCAAAGG |
| | | | GACCACGGTCACCGTCTCCTCAGCTAGCACTAAAGGGCCTTCT |
| | | | GTATTTCCCTTGGCCCCGTCCAGCAAATCGACCTCGGGAGGGA |
| | | | CAGCCGCCCTGGGTTGCCTTGTGAAAGATTATTTCCCTGAGCC |
| | | | AGTTACCGTAAGTTGGAACAGTGGGGCGCTGACAAGTGGTGT |
| | | | GCACACGTTTCCTGCCGTCCTGCAATCATCGGGCTTGTATAGC |
| | | | CTCAGCTCTGTGGTCACTGTCCCAAGTTCATCGCTGGGCACTC |
| | | | AGACGTATATTTGCAATGTGAACCACAAACCTTCAAATACAAA |
| | | | AGTGGATAAACGCGTAGAACCGAAATCGTGTGATAAAACTCA |
| | | | CACATGCCCGCCATGCCCGGCACCTGAACTGCTTGGTGGTCCC |
| | | | AGCGTGTTCCTGTTCCCGCCGAAGCCTAAAGATACTCTAATGA |
| | | | TCAGCCGTACGCCAGAGGTGACATGTGTCGTGGTTGACGTGTC |
| | | | CCACGAAGATCCCGAAGTTAAGTTCAATTGGTATGTTGATGGT |
| | | | GTAGAGGTACACAATGCTAAGACTAAACCTCGCGAGGAGCAG |
| | | | TACGCCTCGACCTATCGTGTCGTGAGCGTTCTGACCGTCCTTCA |
| | | | CCAAGATTGGCTTAACGGCAAAGAATATAAGTGCAAGGTAAG |
| | | | CAATAAAGCACTTCCGGCCCCAATCGAGAAAACCATTTCCAAG |
| | | | GCCAAAGGTCAACCAAGAGAACCCCAGGTGTATACTCTTCCGC |
| | | | CTTCTCGTGAGGAAATGACTAAAAATCAAGTATCCCTTACGTG |
| | | | TCTGGTTAAAGGTTTTTATCCTAGCGATATTGCTGTTGAATGGG |
| | | | AATCGAACGGTCAGCCGGAGAATAATTATAAAACAACGCCAC |
| | | | CCGTCCTGGATAGCGACGGCTCATTTTTTCTGTATAGCAAACT |
| | | | GACTGTAGATAAATCACGGTGGCAGCAGGGCAATGTATTCAG |
| | | | TTGCTCCGTTATGCATGAAGCGTTACATAATCACTACACGCAG |
| | | | AAATCTCTTAGTCTTTCACCCGGT |
| 1401 | ATX-P-3462 | HC IgG1 Fc nt | CAGGTGCAGCTGCAGGAGTCGGGCCCAGGACTGGTGAAGCCT |
| | | | TCGGGGACCCTGTCCCTCACCTGCGCTGTCTCTGGTGGCTCCAT |
| | | | TAGCAGTAATAATTGGTGGAGTTGGGTCCGCCAGGCCCCAGG |
| | | | GAAGGGGCTGGAGTGGATTGGGAAGATCTATCAAAGTGGGAG |
| | | | CACCATGTACAACCCGTCCCTCAAGAGTCGAGTCACCATGTCG |
| | | | GTAGACAAGTCCAAGAACCAGTTCTCCCTGATTCTGAGTTCTG |
| | | | TGACCGCCGCGGACACGGCCGTGTATTACTGTGCGAGAGATA |
| | | | AACCCCCTTTACTGGGAGCCTTTGACTACTGGGGCCAGGGAAC |
| | | | CCTGGTCACTGTCTCCTCAGCTAGCACTAAAGGGCCTTCTGTA |
| | | | TTTCCCTTGGCCCCGTCCAGCAAATCGACCTCGGGAGGGACAG |
| | | | CCGCCCTGGGTTGCCTTGTGAAAGATTATTTCCCTGAGCCAGT |
| | | | TACCGTAAGTTGGAACAGTGGGGCGCTGACAAGTGGTGTGCA |
| | | | CACGTTTCCTGCCGTCCTGCAATCATCGGGCTTGTATAGCCTCA |
| | | | GCTCTGTGGTCACTGTCCCAAGTTCATCGCTGGGCACTCAGAC |
| | | | GTATATTTGCAATGTGAACCACAAACCTTCAAATACAAAAGTG |
| | | | GATAAACGCGTAGAACCGAAATCGTGTGATAAAACTCACACA |
| | | | TGCCCGCCATGCCCGGCACCTGAACTGCTTGGTGGTCCCAGCG |
| | | | TGTTCCTGTTCCCGCCGAAGCCTAAAGATACTCTAATGATCAG |
| | | | CCGTACGCCAGAGGTGACATGTGTCGTGGTTGACGTGTCCCAC |
| | | | GAAGATCCCGAAGTTAAGTTCAATTGGTATGTTGATGGTGTAG |
| | | | AGGTACACAATGCTAAGACTAAACCTCGCGAGGAGCAGTACG |
| | | | CCTCGACCTATCGTGTCGTGAGCGTTCTGACCGTCCTTCACCA |
| | | | AGATTGGCTTAACGGCAAAGAATATAAGTGCAAGGTAAGCAA |
| | | | TAAAGCACTTCCGGCCCCAATCGAGAAAACCATTTCCAAGGCC |
| | | | AAAGGTCAACCAAGAGAACCCCAGGTGTATACTCTTCCGCCTT |
| | | | CTCGTGAGGAAATGACTAAAAATCAAGTATCCCTTACGTGTCT |
| | | | GGTTAAAGGTTTTTATCCTAGCGATATTGCTGTTGAATGGGAA |
| | | | TCGAACGGTCAGCCGGAGAATAATTATAAAACAACGCCACCC |
| | | | GTCCTGGATAGCGACGGCTCATTTTTTCTGTATAGCAAACTGA |
| | | | CTGTAGATAAATCACGGTGGCAGCAGGGCAATGTATTCAGTTG |
| | | | CTCCGTTATGCATGAAGCGTTACATAATCACTACACGCAGAAA |
| | | | TCTCTTAGTCTTTCACCCGGT |
| 1402 | ATX-P-3463 | HC IgG1 Fc nt | CAGGTGCAGCTGGTGGAGTCTGGGGGAGGCGTGGTCCAGCCT |
| | | | GGGAGGTCCCTGAGACTCTCCTGTGCAGCCTCTGGATTCACCT |
| | | | TCAGTAGCTATGCCATGCACTGGGTCCGCCAGGCTCCAGGCAA |
| | | | GGGGCTGGAGTGGGTGGCAGTTATATCATATGATGGAAGTAA |
| | | | TAAATACTATGCGGACTCCGTGAAGGGCCGATTCACCATCTCC |
| | | | AGAGACAATTCCAAGAACACGCTGTCTCTGCAAATGAACAGC |
| | | | CTGAGAGCTGAGGACACGGCTGTGTATTACTGTGCGAAAAGG |
| | | | GGGGGATACAGCTATGGTCCTTTTGAACACTGGGGCCAGGGA |
| | | | ACCCTGGTCACCGTCTCCTCAGCTAGCACTAAAGGGCCTTCTG |
| | | | TATTTCCCTTGGCCCCGTCCAGCAAATCGACCTCGGGAGGGAC |
| | | | AGCCGCCCTGGGTTGCCTTGTGAAAGATTATTTCCCTGAGCCA |
| | | | GTTACCGTAAGTTGGAACAGTGGGGCGCTGACAAGTGGTGTG |
| | | | CACACGTTTCCTGCCGTCCTGCAATCATCGGGCTTGTATAGCCT |
| | | | CAGCTCTGTGGTCACTGTCCCAAGTTCATCGCTGGGCACTCAG |
| | | | ACGTATATTTGCAATGTGAACCACAAACCTTCAAATACAAAAG |
| | | | TGGATAAACGCGTAGAACCGAAATCGTGTGATAAAACTCACA |
| | | | CATGCCCGCCATGCCCGGCACCTGAACTGCTTGGTGGTCCCAG |
| | | | CGTGTTCCTGTTCCCGCCGAAGCCTAAAGATACTCTAATGATC |
| | | | AGCCGTACGCCAGAGGTGACATGTGTCGTGGTTGACGTGTCCC |
| | | | ACGAAGATCCCGAAGTTAAGTTCAATTGGTATGTTGATGGTGT |
| | | | AGAGGTACACAATGCTAAGACTAAACCTCGCGAGGAGCAGTA |
| | | | CGCCTCGACCTATCGTGTCGTGAGCGTTCTGACCGTCCTTCACC |
| | | | AAGATTGGCTTAACGGCAAAGAATATAAGTGCAAGGTAAGCA |
| | | | ATAAAGCACTTCCGGCCCCAATCGAGAAAACCATTTCCAAGGC |
| | | | CAAAGGTCAACCAAGAGAACCCCAGGTGTATACTCTTCCGCCT |
| | | | TCTCGTGAGGAAATGACTAAAAATCAAGTATCCCTTACGTGTC |
| | | | TGGTTAAAGGTTTTTATCCTAGCGATATTGCTGTTGAATGGGA |
| | | | ATCGAACGGTCAGCCGGAGAATAATTATAAAACAACGCCACC |
| | | | CGTCCTGGATAGCGACGGCTCATTTTTTCTGTATAGCAAACTG |
| | | | ACTGTAGATAAATCACGGTGGCAGCAGGGCAATGTATTCAGTT |
| | | | GCTCCGTTATGCATGAAGCGTTACATAATCACTACACGCAGAA |
| | | | ATCTCTTAGTCTTTCACCCGGT |
| 1403 | ATX-P-3466 | HC IgG1 Fc nt | CAGGTGCAGCTGGTGCAATCTGGGTCTGAATTGAAGAAGCCTG |
| | | | GGGCCTCAGTGAAGGTTTCCTGCAAGGCTTCTGGATACACCTT |
| | | | CACTAGCTATACTATGAATTGGGTGCGACAGGCCCCTGGACAA |
| | | | GGGCTTGAGTGGGTGGGATGGATCAACACCGCCACTGGGACC |
| | | | CCAACGTATGCCCAGGGCTTCACAGGACGGTATGTCTTCTCCT |
| | | | TGGACACCTCTGTCAGCACGGCTTATCTGCAGATCAGCGGCCT |
| | | | AAAGGCTGAGGACACTGCCGTGTATTTCTGTGCGAGGTATAGT |
| | | | GGGAGCCACTCCTTTGACTACTGGGGCCAGGGAACCCTGGTCA |
| | | | CCGTCTCTTCAGCTAGCACTAAAGGGCCTTCTGTATTTCCCTTG |
| | | | GCCCCGTCCAGCAAATCGACCTCGGGAGGGACAGCCGCCCTG |
| | | | GGTTGCCTTGTGAAAGATTATTTCCCTGAGCCAGTTACCGTAA |
| | | | GTTGGAACAGTGGGGCGCTGACAAGTGGTGTGCACACGTTTCC |
| | | | TGCCGTCCTGCAATCATCGGGCTTGTATAGCCTCAGCTCTGTG |
| | | | GTCACTGTCCCAAGTTCATCGCTGGGCACTCAGACGTATATTT |
| | | | GCAATGTGAACCACAAACCTTCAAATACAAAAGTGGATAAAC |
| | | | GCGTAGAACCGAAATCGTGTGATAAAACTCACACATGCCCGC |
| | | | CATGCCCGGCACCTGAACTGCTTGGTGGTCCCAGCGTGTTCCT |
| | | | GTTCCCGCCGAAGCCTAAAGATACTCTAATGATCAGCCGTACG |
| | | | CCAGAGGTGACATGTGTCGTGGTTGACGTGTCCCACGAAGATC |
| | | | CCGAAGTTAAGTTCAATTGGTATGTTGATGGTGTAGAGGTACA |
| | | | CAATGCTAAGACTAAACCTCGCGAGGAGCAGTACGCCTCGAC |
| | | | CTATCGTGTCGTGAGCGTTCTGACCGTCCTTCACCAAGATTGG |
| | | | CTTAACGGCAAAGAATATAAGTGCAAGGTAAGCAATAAAGCA |
| | | | CTTCCGGCCCCAATCGAGAAAACCATTTCCAAGGCCAAAGGTC |
| | | | AACCAAGAGAACCCCAGGTGTATACTCTTCCGCCTTCTCGTGA |
| | | | GGAAATGACTAAAAATCAAGTATCCCTTACGTGTCTGGTTAAA |
| | | | GGTTTTTATCCTAGCGATATTGCTGTTGAATGGGAATCGAACG |
| | | | GTCAGCCGGAGAATAATTATAAAACAACGCCACCCGTCCTGG |
| | | | ATAGCGACGGCTCATTTTTTCTGTATAGCAAACTGACTGTAGA |
| | | | TAAATCACGGTGGCAGCAGGGCAATGTATTCAGTTGCTCCGTT |
| | | | ATGCATGAAGCGTTACATAATCACTACACGCAGAAATCTCTTA |
| | | | GTCTTTCACCCGGT |
| 1404 | ATX-P-3467 | HC IgG1 Fc nt | CAGGTGCAGCTGCAGGAGTCGGGCCCAGGACTGGTGAAGCCT |
| | | | TCGGGGACCCTGTCCCTCACCTGCGCTGTCTCTGGTGGCTCCAT |
| | | | CAGTAGTGATTACTGGTGGAGTTGGGTCCGCCAGTCCCCAGGG |
| | | | AAGGGGCTGGAGTGGATTGGGAAAATCTATCATAGTGGGAAC |
| | | | ACCAACCACAACCCGTCCCTCAAGAGTCGAGTCACCATATCAA |
| | | | TAGACAAGTCCAGGAACCAGTTCTCCCTGAATCTGAACTCTGT |
| | | | GACCGCCGCGGACACGGCCGTGTATTACTGTGCGAGAGAAGG |
| | | | ACTGGAACTTCCCCACATGGACGTCTGGGGCAAAGGGACCAC |
| | | | GGTCACCGTCTCCTCAGCTAGCACTAAAGGGCCTTCTGTATTT |
| | | | CCCTTGGCCCCGTCCAGCAAATCGACCTCGGGAGGGACAGCC |
| | | | GCCCTGGGTTGCCTTGTGAAAGATTATTTCCCTGAGCCAGTTA |
| | | | CCGTAAGTTGGAACAGTGGGGCGCTGACAAGTGGTGTGCACA |
| | | | CGTTTCCTGCCGTCCTGCAATCATCGGGCTTGTATAGCCTCAGC |
| | | | TCTGTGGTCACTGTCCCAAGTTCATCGCTGGGCACTCAGACGT |
| | | | ATATTTGCAATGTGAACCACAAACCTTCAAATACAAAAGTGGA |
| | | | TAAACGCGTAGAACCGAAATCGTGTGATAAAACTCACACATG |
| | | | CCCGCCATGCCCGGCACCTGAACTGCTTGGTGGTCCCAGCGTG |
| | | | TTCCTGTTCCCGCCGAAGCCTAAAGATACTCTAATGATCAGCC |
| | | | GTACGCCAGAGGTGACATGTGTCGTGGTTGACGTGTCCCACGA |
| | | | AGATCCCGAAGTTAAGTTCAATTGGTATGTTGATGGTGTAGAG |
| | | | GTACACAATGCTAAGACTAAACCTCGCGAGGAGCAGTACGCC |
| | | | TCGACCTATCGTGTCGTGAGCGTTCTGACCGTCCTTCACCAAG |
| | | | ATTGGCTTAACGGCAAAGAATATAAGTGCAAGGTAAGCAATA |
| | | | AAGCACTTCCGGCCCCAATCGAGAAAACCATTTCCAAGGCCA |
| | | | AAGGTCAACCAAGAGAACCCCAGGTGTATACTCTTCCGCCTTC |
| | | | TCGTGAGGAAATGACTAAAAATCAAGTATCCCTTACGTGTCTG |
| | | | GTTAAAGGTTTTTATCCTAGCGATATTGCTGTTGAATGGGAAT |
| | | | CGAACGGTCAGCCGGAGAATAATTATAAAACAACGCCACCCG |
| | | | TCCTGGATAGCGACGGCTCATTTTTTCTGTATAGCAAACTGAC |
| | | | TGTAGATAAATCACGGTGGCAGCAGGGCAATGTATTCAGTTGC |
| | | | TCCGTTATGCATGAAGCGTTACATAATCACTACACGCAGAAAT |
| | | | CTCTTAGTCTTTCACCCGGT |
| 1405 | ATX-P-3468 | HC IgG1 Fc nt | CAGGTGCAGCTGGTGGAGTCTGGGGGAGGCTTGGTCCAGCCT |
| | | | GGGAGGTCCCTGAGACTCTCCTGTGCAGCCTCTGGATTCACCT |
| | | | TCAGTAGTTATGCTATGCACTGGGTCCGCCAGGCTCCAGGCAA |
| | | | GGGGCTGGAGTGGGTGACAGTTATATCATATGATGGAAGTAA |
| | | | TAAATACTATGCAGACTCCGTGAAGGGCCGATTCACCATCTCC |
| | | | AGAGACAATTCCAAGAACACGCTGTATCTGCAAATGAACAGC |
| | | | CTGAGAGCTGAGGACACGGCTGTGTATTACTGTGCGAAAAGG |
| | | | GGTAACTGGAACTACGGACCTTTTCACTACTGGGGCCAGGGAA |
| | | | CCCTGGTCACTGTCTCCTCAGCTAGCACTAAAGGGCCTTCTGT |
| | | | ATTTCCCTTGGCCCCGTCCAGCAAATCGACCTCGGGAGGGACA |
| | | | GCCGCCCTGGGTTGCCTTGTGAAAGATTATTTCCCTGAGCCAG |
| | | | TTACCGTAAGTTGGAACAGTGGGGCGCTGACAAGTGGTGTGC |
| | | | ACACGTTTCCTGCCGTCCTGCAATCATCGGGCTTGTATAGCCTC |
| | | | AGCTCTGTGGTCACTGTCCCAAGTTCATCGCTGGGCACTCAGA |
| | | | CGTATATTTGCAATGTGAACCACAAACCTTCAAATACAAAAGT |
| | | | GGATAAACGCGTAGAACCGAAATCGTGTGATAAAACTCACAC |
| | | | ATGCCCGCCATGCCCGGCACCTGAACTGCTTGGTGGTCCCAGC |
| | | | GTGTTCCTGTTCCCGCCGAAGCCTAAAGATACTCTAATGATCA |
| | | | GCCGTACGCCAGAGGTGACATGTGTCGTGGTTGACGTGTCCCA |
| | | | CGAAGATCCCGAAGTTAAGTTCAATTGGTATGTTGATGGTGTA |
| | | | GAGGTACACAATGCTAAGACTAAACCTCGCGAGGAGCAGTAC |
| | | | GCCTCGACCTATCGTGTCGTGAGCGTTCTGACCGTCCTTCACC |
| | | | AAGATTGGCTTAACGGCAAAGAATATAAGTGCAAGGTAAGCA |
| | | | ATAAAGCACTTCCGGCCCCAATCGAGAAAACCATTTCCAAGGC |
| | | | CAAAGGTCAACCAAGAGAACCCCAGGTGTATACTCTTCCGCCT |
| | | | TCTCGTGAGGAAATGACTAAAAATCAAGTATCCCTTACGTGTC |
| | | | TGGTTAAAGGTTTTTATCCTAGCGATATTGCTGTTGAATGGGA |
| | | | ATCGAACGGTCAGCCGGAGAATAATTATAAAACAACGCCACC |
| | | | CGTCCTGGATAGCGACGGCTCATTTTTTCTGTATAGCAAACTG |
| | | | ACTGTAGATAAATCACGGTGGCAGCAGGGCAATGTATTCAGTT |
| | | | GCTCCGTTATGCATGAAGCGTTACATAATCACTACACGCAGAA |
| | | | ATCTCTTAGTCTTTCACCCGGT |
| 1406 | ATX-P-3469 | HC IgG1 Fc nt | CAGGTGCAGCTGGTGGAGTCTGGGGGAGGCGTGGTCCAGCCT |
| | | | GGGAGGTCCCTGAGACTCTCCTGTGCAGCCTCTGGATTCACCT |
| | | | TCAGTGCCTATGCCATCCACTGGGTCCGCCAGGCTCCAGGCAA |
| | | | GGGGCTGGAGTGGGTGGCAGTTATATCATATGATGGAAGTAA |
| | | | TAAAAAGTATGCAGACTCCGTGAAGGGCCGATTCACCATCTCC |
| | | | AGAGACAATTCCAAGAACACGCTGGATCTGGAAATGAACAGC |
| | | | CTGAGAGCTGAGGACACGGCTGTGTACTACTGTGCGAAAGGG |
| | | | CTACCTTTTGACTACTGGGGCCAGGGAACCCTGGTCACCGTCT |
| | | | CCTCAGCTAGCACTAAAGGGCCTTCTGTATTTCCCTTGGCCCC |
| | | | GTCCAGCAAATCGACCTCGGGAGGGACAGCCGCCCTGGGTTG |
| | | | CCTTGTGAAAGATTATTTCCCTGAGCCAGTTACCGTAAGTTGG |
| | | | AACAGTGGGGCGCTGACAAGTGGTGTGCACACGTTTCCTGCCG |
| | | | TCCTGCAATCATCGGGCTTGTATAGCCTCAGCTCTGTGGTCACT |
| | | | GTCCCAAGTTCATCGCTGGGCACTCAGACGTATATTTGCAATG |
| | | | TGAACCACAAACCTTCAAATACAAAAGTGGATAAACGCGTAG |
| | | | AACCGAAATCGTGTGATAAAACTCACACATGCCCGCCATGCCC |
| | | | GGCACCTGAACTGCTTGGTGGTCCCAGCGTGTTCCTGTTCCCG |
| | | | CCGAAGCCTAAAGATACTCTAATGATCAGCCGTACGCCAGAG |
| | | | GTGACATGTGTCGTGGTTGACGTGTCCCACGAAGATCCCGAAG |
| | | | TTAAGTTCAATTGGTATGTTGATGGTGTAGAGGTACACAATGC |
| | | | TAAGACTAAACCTCGCGAGGAGCAGTACGCCTCGACCTATCGT |
| | | | GTCGTGAGCGTTCTGACCGTCCTTCACCAAGATTGGCTTAACG |
| | | | GCAAAGAATATAAGTGCAAGGTAAGCAATAAAGCACTTCCGG |
| | | | CCCCAATCGAGAAAACCATTTCCAAGGCCAAAGGTCAACCAA |
| | | | GAGAACCCCAGGTGTATACTCTTCCGCCTTCTCGTGAGGAAAT |
| | | | GACTAAAAATCAAGTATCCCTTACGTGTCTGGTTAAAGGTTTT |
| | | | TATCCTAGCGATATTGCTGTTGAATGGGAATCGAACGGTCAGC |
| | | | CGGAGAATAATTATAAAACAACGCCACCCGTCCTGGATAGCG |
| | | | ACGGCTCATTTTTTCTGTATAGCAAACTGACTGTAGATAAATC |
| | | | ACGGTGGCAGCAGGGCAATGTATTCAGTTGCTCCGTTATGCAT |
| | | | GAAGCGTTACATAATCACTACACGCAGAAATCTCTTAGTCTTT |
| | | | CACCCGGT |
| 1407 | ATX-P-3470 | HC IgG1 Fc nt | CAGGTGCAGCTGGTGCAATCTGGGTCTGACTTGAAGAAGCCTG |
| | | | GGGCCTCAGTGAAGGTTTCCTGCAAGGCTTCTGGATACACCTT |
| | | | CACTAGTTATACTATGAATTGGGTGCGACAGGCCCCTGGACAA |
| | | | GGGCTTGAGTGGATGGGATGGATCAACACCAACACTGGGACC |
| | | | CCAACGTATGCCCAGGGCTTCACAGGACGGTTTGTCTTCTCCT |
| | | | TGGACACCTCTGTCAGCACGGCATATCTGCAGATCAGCAGCCT |
| | | | AAAGGCTGAGGACACTGCCGTGTATTACTGTACGAGGTATACT |
| | | | GGGAACTACTCCTTTGACTACTGGGGCCAGGGAACCCTGGTCA |
| | | | CCGTCTCCTCAGCTAGCACTAAAGGGCCTTCTGTATTTCCCTTG |
| | | | GCCCCGTCCAGCAAATCGACCTCGGGAGGGACAGCCGCCCTG |
| | | | GGTTGCCTTGTGAAAGATTATTTCCCTGAGCCAGTTACCGTAA |
| | | | GTTGGAACAGTGGGGCGCTGACAAGTGGTGTGCACACGTTTCC |
| | | | TGCCGTCCTGCAATCATCGGGCTTGTATAGCCTCAGCTCTGTG |
| | | | GTCACTGTCCCAAGTTCATCGCTGGGCACTCAGACGTATATTT |
| | | | GCAATGTGAACCACAAACCTTCAAATACAAAAGTGGATAAAC |
| | | | GCGTAGAACCGAAATCGTGTGATAAAACTCACACATGCCCGC |
| | | | CATGCCCGGCACCTGAACTGCTTGGTGGTCCCAGCGTGTTCCT |
| | | | GTTCCCGCCGAAGCCTAAAGATACTCTAATGATCAGCCGTACG |
| | | | CCAGAGGTGACATGTGTCGTGGTTGACGTGTCCCACGAAGATC |
| | | | CCGAAGTTAAGTTCAATTGGTATGTTGATGGTGTAGAGGTACA |
| | | | CAATGCTAAGACTAAACCTCGCGAGGAGCAGTACGCCTCGAC |
| | | | CTATCGTGTCGTGAGCGTTCTGACCGTCCTTCACCAAGATTGG |
| | | | CTTAACGGCAAAGAATATAAGTGCAAGGTAAGCAATAAAGCA |
| | | | CTTCCGGCCCCAATCGAGAAAACCATTTCCAAGGCCAAAGGTC |
| | | | AACCAAGAGAACCCCAGGTGTATACTCTTCCGCCTTCTCGTGA |
| | | | GGAAATGACTAAAAATCAAGTATCCCTTACGTGTCTGGTTAAA |
| | | | GGTTTTTATCCTAGCGATATTGCTGTTGAATGGGAATCGAACG |
| | | | GTCAGCCGGAGAATAATTATAAAACAACGCCACCCGTCCTGG |
| | | | ATAGCGACGGCTCATTTTTTCTGTATAGCAAACTGACTGTAGA |
| | | | TAAATCACGGTGGCAGCAGGGCAATGTATTCAGTTGCTCCGTT |
| | | | ATGCATGAAGCGTTACATAATCACTACACGCAGAAATCTCTTA |
| | | | GTCTTTCACCCGGT |
| 1408 | ATX-P-3471 | HC IgG1 Fc nt | GAGGTGCAGCTGGTGGAGTCTGGGGGAGTCTTGGTACAGCCT |
| | | | GGGGGGTCCCTGAGACTCTCCTGTGCAGCCTCTGGATTCACCT |
| | | | TTAGGAGCTATGCCATGAGCTGGGTCCGCCAGGCTCCAGGGA |
| | | | AGGGGCTGGAGTGGGTCTCAGCTATTAGTGGTAGTGGTGATAG |
| | | | CACATACTTCGCAGACTCCGTGAAGGGCCGGTTCACCATCTCC |
| | | | AGAGACAATTCCAAGAACACGCTGTCTCTGCAAATGAACAGC |
| | | | CTGAGAGCCGAGGACACGGCCGTATATTACTGTGCGAGCATCC |
| | | | TAGGATATTGTAGTGGTACCAGCTGCTATGGCCTCTTTGACAA |
| | | | CTGGGGCCAGGGAACCCTGGTCACCGTCTCCTCAGCTAGCACT |
| | | | AAAGGGCCTTCTGTATTTCCCTTGGCCCCGTCCAGCAAATCGA |
| | | | CCTCGGGAGGGACAGCCGCCCTGGGTTGCCTTGTGAAAGATTA |
| | | | TTTCCCTGAGCCAGTTACCGTAAGTTGGAACAGTGGGGCGCTG |
| | | | ACAAGTGGTGTGCACACGTTTCCTGCCGTCCTGCAATCATCGG |
| | | | GCTTGTATAGCCTCAGCTCTGTGGTCACTGTCCCAAGTTCATCG |
| | | | CTGGGCACTCAGACGTATATTTGCAATGTGAACCACAAACCTT |
| | | | CAAATACAAAAGTGGATAAACGCGTAGAACCGAAATCGTGTG |
| | | | ATAAAACTCACACATGCCCGCCATGCCCGGCACCTGAACTGCT |
| | | | TGGTGGTCCCAGCGTGTTCCTGTTCCCGCCGAAGCCTAAAGAT |
| | | | ACTCTAATGATCAGCCGTACGCCAGAGGTGACATGTGTCGTGG |
| | | | TTGACGTGTCCCACGAAGATCCCGAAGTTAAGTTCAATTGGTA |
| | | | TGTTGATGGTGTAGAGGTACACAATGCTAAGACTAAACCTCGC |
| | | | GAGGAGCAGTACGCCTCGACCTATCGTGTCGTGAGCGTTCTGA |
| | | | CCGTCCTTCACCAAGATTGGCTTAACGGCAAAGAATATAAGTG |
| | | | CAAGGTAAGCAATAAAGCACTTCCGGCCCCAATCGAGAAAAC |
| | | | CATTTCCAAGGCCAAAGGTCAACCAAGAGAACCCCAGGTGTA |
| | | | TACTCTTCCGCCTTCTCGTGAGGAAATGACTAAAAATCAAGTA |
| | | | TCCCTTACGTGTCTGGTTAAAGGTTTTTATCCTAGCGATATTGC |
| | | | TGTTGAATGGGAATCGAACGGTCAGCCGGAGAATAATTATAA |
| | | | AACAACGCCACCCGTCCTGGATAGCGACGGCTCATTTTTTCTG |
| | | | TATAGCAAACTGACTGTAGATAAATCACGGTGGCAGCAGGGC |
| | | | AATGTATTCAGTTGCTCCGTTATGCATGAAGCGTTACATAATC |
| | | | ACTACACGCAGAAATCTCTTAGTCTTTCACCCGGT |
| 1409 | ATX-P-3472 | HC IgG1 Fc nt | CAGGTGCAGCTGCAGGAGTCGGGCCCAGGACTGGTGAAGCCT |
| | | | TCGGGGACCCTGTCCCTCACCTGCGCTGTCTCTGGTGGCTCCAT |
| | | | CAGTAATGATAACTGGTGGAGTTGGGTCCGCCAGTCCCCCGGG |
| | | | AAGGGGCTGGAGTGGATTGGGAAAATCTATCATAGTGAGTTC |
| | | | ACCAACTACAACCCGTCCCTCAGGAGTCGAGTCACCATATCAG |
| | | | TAGACAAGTCCAAGAACCAGTTCTCCCTGGAGCTGACCTCTGT |
| | | | GACCGCCGCGGACACGGCCGTGTATTACTGTGCGAGAGAGTA |
| | | | TCAGAACTACATGGACGTCTGGGGCAAAGGGACCACGGTCAC |
| | | | CGTCTCCTCAGCTAGCACTAAAGGGCCTTCTGTATTTCCCTTGG |
| | | | CCCCGTCCAGCAAATCGACCTCGGGAGGGACAGCCGCCCTGG |
| | | | GTTGCCTTGTGAAAGATTATTTCCCTGAGCCAGTTACCGTAAG |
| | | | TTGGAACAGTGGGGCGCTGACAAGTGGTGTGCACACGTTTCCT |
| | | | GCCGTCCTGCAATCATCGGGCTTGTATAGCCTCAGCTCTGTGG |
| | | | TCACTGTCCCAAGTTCATCGCTGGGCACTCAGACGTATATTTG |
| | | | CAATGTGAACCACAAACCTTCAAATACAAAAGTGGATAAACG |
| | | | CGTAGAACCGAAATCGTGTGATAAAACTCACACATGCCCGCC |
| | | | ATGCCCGGCACCTGAACTGCTTGGTGGTCCCAGCGTGTTCCTG |
| | | | TTCCCGCCGAAGCCTAAAGATACTCTAATGATCAGCCGTACGC |
| | | | CAGAGGTGACATGTGTCGTGGTTGACGTGTCCCACGAAGATCC |
| | | | CGAAGTTAAGTTCAATTGGTATGTTGATGGTGTAGAGGTACAC |
| | | | AATGCTAAGACTAAACCTCGCGAGGAGCAGTACGCCTCGACC |
| | | | TATCGTGTCGTGAGCGTTCTGACCGTCCTTCACCAAGATTGGC |
| | | | TTAACGGCAAAGAATATAAGTGCAAGGTAAGCAATAAAGCAC |
| | | | TTCCGGCCCCAATCGAGAAAACCATTTCCAAGGCCAAAGGTCA |
| | | | ACCAAGAGAACCCCAGGTGTATACTCTTCCGCCTTCTCGTGAG |
| | | | GAAATGACTAAAAATCAAGTATCCCTTACGTGTCTGGTTAAAG |
| | | | GTTTTTATCCTAGCGATATTGCTGTTGAATGGGAATCGAACGG |
| | | | TCAGCCGGAGAATAATTATAAAACAACGCCACCCGTCCTGGAT |
| | | | AGCGACGGCTCATTTTTTCTGTATAGCAAACTGACTGTAGATA |
| | | | AATCACGGTGGCAGCAGGGCAATGTATTCAGTTGCTCCGTTAT |
| | | | GCATGAAGCGTTACATAATCACTACACGCAGAAATCTCTTAGT |
| | | | CTTTCACCCGGT |
| 1410 | ATX-P-3361 | HC IgG1 Fc nt | CAGGTGCAGCTGCAGGAGTCGGGCCCAGGACTGGTGAAGCCT |
| | | | TCGGGGACCCTGTCCCTCACCTGCGTTGTCTCTGGTGACTCCAT |
| | | | CAGCAGTAATAACTGGTGGAGTTGGGTCCGCCAGCCCCCAGG |
| | | | GAAGGGTCTGGAGTGGATTGGACAAATCTATCATAGTGGAAT |
| | | | CACCAACTACAACCCGTCCCTCAAGAGTCGAGTCACCATATCA |
| | | | GTAGACAAGTCCAAGAACCAGTTCTCCCTGGAGCTGACCTCTG |
| | | | TGACCGCCGCGGACGCGGCCGTGTATTACTGTGCGAGGGCCCA |
| | | | GTGGGAACTACGAGCGGGCTGGTTCGACCCCTGGGGCCAGGG |
| | | | AACCCTGGTCACCGTCTCCTCAGCTAGCACTAAAGGGCCTTCT |
| | | | GTATTTCCCTTGGCCCCGTCCAGCAAATCGACCTCGGGAGGGA |
| | | | CAGCCGCCCTGGGTTGCCTTGTGAAAGATTATTTCCCTGAGCC |
| | | | AGTTACCGTAAGTTGGAACAGTGGGGCGCTGACAAGTGGTGT |
| | | | GCACACGTTTCCTGCCGTCCTGCAATCATCGGGCTTGTATAGC |
| | | | CTCAGCTCTGTGGTCACTGTCCCAAGTTCATCGCTGGGCACTC |
| | | | AGACGTATATTTGCAATGTGAACCACAAACCTTCAAATACAAA |
| | | | AGTGGATAAACGCGTAGAACCGAAATCGTGTGATAAAACTCA |
| | | | CACATGCCCGCCATGCCCGGCACCTGAACTGCTTGGTGGTCCC |
| | | | AGCGTGTTCCTGTTCCCGCCGAAGCCTAAAGATACTCTAATGA |
| | | | TCAGCCGTACGCCAGAGGTGACATGTGTCGTGGTTGACGTGTC |
| | | | CCACGAAGATCCCGAAGTTAAGTTCAATTGGTATGTTGATGGT |
| | | | GTAGAGGTACACAATGCTAAGACTAAACCTCGCGAGGAGCAG |
| | | | TACGCCTCGACCTATCGTGTCGTGAGCGTTCTGACCGTCCTTCA |
| | | | CCAAGATTGGCTTAACGGCAAAGAATATAAGTGCAAGGTAAG |
| | | | CAATAAAGCACTTCCGGCCCCAATCGAGAAAACCATTTCCAAG |
| | | | GCCAAAGGTCAACCAAGAGAACCCCAGGTGTATACTCTTCCGC |
| | | | CTTCTCGTGAGGAAATGACTAAAAATCAAGTATCCCTTACGTG |
| | | | TCTGGTTAAAGGTTTTTATCCTAGCGATATTGCTGTTGAATGGG |
| | | | AATCGAACGGTCAGCCGGAGAATAATTATAAAACAACGCCAC |
| | | | CCGTCCTGGATAGCGACGGCTCATTTTTTCTGTATAGCAAACT |
| | | | GACTGTAGATAAATCACGGTGGCAGCAGGGCAATGTATTCAG |
| | | | TTGCTCCGTTATGCATGAAGCGTTACATAATCACTACACGCAG |
| | | | AAATCTCTTAGTCTTTCACCCGGT |
| 1411 | ATX-P-3366 | HC IgG1 Fc nt | GAGGTGCAGCTGGTGGAGTCTGGGGGAGGCTTGGTAAAGCCT |
| | | | GGGGGGACCCTTACACTCTCCTGTGCAGCCTCTGGATTCACTT |
| | | | TCAGTAACGCCTGGATGAGCTGGGTCCGCCAGGCTCCAGGGA |
| | | | AGGGGCTGGAGTGGGTTGGCCGTATTAAAAGCAAAACTGATG |
| | | | GCGGGACAACAGACTACGCTGCACCCGTGAAAGGCAGATTCA |
| | | | CCATCTCAAGAGATGATTCAAAAAACACGCTGTATCTGCAAAT |
| | | | GAACAGCCTGAAAACCGAGGACACAGCCGTGTATTACTGTAC |
| | | | CCCCCGGTACAACTCGGACTTTGACTACTGGGGCCAAGGAACC |
| | | | CTGGTCACCGTCTCTTCAGCTAGCACTAAAGGGCCTTCTGTATT |
| | | | TCCCTTGGCCCCGTCCAGCAAATCGACCTCGGGAGGGACAGCC |
| | | | GCCCTGGGTTGCCTTGTGAAAGATTATTTCCCTGAGCCAGTTA |
| | | | CCGTAAGTTGGAACAGTGGGGCGCTGACAAGTGGTGTGCACA |
| | | | CGTTTCCTGCCGTCCTGCAATCATCGGGCTTGTATAGCCTCAGC |
| | | | TCTGTGGTCACTGTCCCAAGTTCATCGCTGGGCACTCAGACGT |
| | | | ATATTTGCAATGTGAACCACAAACCTTCAAATACAAAAGTGGA |
| | | | TAAACGCGTAGAACCGAAATCGTGTGATAAAACTCACACATG |
| | | | CCCGCCATGCCCGGCACCTGAACTGCTTGGTGGTCCCAGCGTG |
| | | | TTCCTGTTCCCGCCGAAGCCTAAAGATACTCTAATGATCAGCC |
| | | | GTACGCCAGAGGTGACATGTGTCGTGGTTGACGTGTCCCACGA |
| | | | AGATCCCGAAGTTAAGTTCAATTGGTATGTTGATGGTGTAGAG |
| | | | GTACACAATGCTAAGACTAAACCTCGCGAGGAGCAGTACGCC |
| | | | TCGACCTATCGTGTCGTGAGCGTTCTGACCGTCCTTCACCAAG |
| | | | ATTGGCTTAACGGCAAAGAATATAAGTGCAAGGTAAGCAATA |
| | | | AAGCACTTCCGGCCCCAATCGAGAAAACCATTTCCAAGGCCA |
| | | | AAGGTCAACCAAGAGAACCCCAGGTGTATACTCTTCCGCCTTC |
| | | | TCGTGAGGAAATGACTAAAAATCAAGTATCCCTTACGTGTCTG |
| | | | GTTAAAGGTTTTTATCCTAGCGATATTGCTGTTGAATGGGAAT |
| | | | CGAACGGTCAGCCGGAGAATAATTATAAAACAACGCCACCCG |
| | | | TCCTGGATAGCGACGGCTCATTTTTTCTGTATAGCAAACTGAC |
| | | | TGTAGATAAATCACGGTGGCAGCAGGGCAATGTATTCAGTTGC |
| | | | TCCGTTATGCATGAAGCGTTACATAATCACTACACGCAGAAAT |
| | | | CTCTTAGTCTTTCACCCGGT |
| 1412 | ATX-P-3376 | HC IgG1 Fc nt | CAGGTGCAGCTGCAGGAGTCGGGCCCAGGACTGGTGAAGCCT |
| | | | TCGGAGACCCTGTCCCTCACCTGCACTGTCTCTGGTGGCTCCAT |
| | | | CAGTAGTTACTACTGGAGCTGGATCCGGCAGCCCCCAGGGAA |
| | | | GGGACTGGAGTGGATTGGGTATATCTATTACAGTGGGTTCACC |
| | | | AAGTACAACCCCTCCCTCAAGAGTCGAGTCACCATATCAGTAG |
| | | | ACACGTCCAAGAACCAGTTCTCCCTGAAGCTGAGCTCTGTGAC |
| | | | CGCTGCGGACACGGCCGTGTATTACTGTGCGACCCACCCTCGT |
| | | | GGATACAACTATGGTCCCTTTGACTACTGGGGCCAGGGAACCC |
| | | | TGGTCACTGTCTCCTCAGCTAGCACTAAAGGGCCTTCTGTATTT |
| | | | CCCTTGGCCCCGTCCAGCAAATCGACCTCGGGAGGGACAGCC |
| | | | GCCCTGGGTTGCCTTGTGAAAGATTATTTCCCTGAGCCAGTTA |
| | | | CCGTAAGTTGGAACAGTGGGGCGCTGACAAGTGGTGTGCACA |
| | | | CGTTTCCTGCCGTCCTGCAATCATCGGGCTTGTATAGCCTCAGC |
| | | | TCTGTGGTCACTGTCCCAAGTTCATCGCTGGGCACTCAGACGT |
| | | | ATATTTGCAATGTGAACCACAAACCTTCAAATACAAAAGTGGA |
| | | | TAAACGCGTAGAACCGAAATCGTGTGATAAAACTCACACATG |
| | | | CCCGCCATGCCCGGCACCTGAACTGCTTGGTGGTCCCAGCGTG |
| | | | TTCCTGTTCCCGCCGAAGCCTAAAGATACTCTAATGATCAGCC |
| | | | GTACGCCAGAGGTGACATGTGTCGTGGTTGACGTGTCCCACGA |
| | | | AGATCCCGAAGTTAAGTTCAATTGGTATGTTGATGGTGTAGAG |
| | | | GTACACAATGCTAAGACTAAACCTCGCGAGGAGCAGTACGCC |
| | | | TCGACCTATCGTGTCGTGAGCGTTCTGACCGTCCTTCACCAAG |
| | | | ATTGGCTTAACGGCAAAGAATATAAGTGCAAGGTAAGCAATA |
| | | | AAGCACTTCCGGCCCCAATCGAGAAAACCATTTCCAAGGCCA |
| | | | AAGGTCAACCAAGAGAACCCCAGGTGTATACTCTTCCGCCTTC |
| | | | TCGTGAGGAAATGACTAAAAATCAAGTATCCCTTACGTGTCTG |
| | | | GTTAAAGGTTTTTATCCTAGCGATATTGCTGTTGAATGGGAAT |
| | | | CGAACGGTCAGCCGGAGAATAATTATAAAACAACGCCACCCG |
| | | | TCCTGGATAGCGACGGCTCATTTTTTCTGTATAGCAAACTGAC |
| | | | TGTAGATAAATCACGGTGGCAGCAGGGCAATGTATTCAGTTGC |
| | | | TCCGTTATGCATGAAGCGTTACATAATCACTACACGCAGAAAT |
| | | | CTCTTAGTCTTTCACCCGGT |
| 1413 | ATX-P-3377 | HC IgG1 Fc nt | CAGGTGCAGCTGCAGGAGTCGGGCCCAGGACTGGTGAAGCCT |
| | | | TCGGAGACCCTGTCCCTCACCTGCACTGTCTCTGGTGGCTCCGT |
| | | | CAACAGTGGTCGTTACTACTGGAGCTGGATCCGGCAGCCCCCA |
| | | | GGGAAGGGACTGGAGTGGATTGGGTATATCTATTCCAGTGGGT |
| | | | ACACCAACTACAACCCCTCCCTCAAGAGTCGAGTCACCATGTT |
| | | | ACTAGACACGTCCAAGAACCAGTTCTCCCTGAAGCTGAACTCC |
| | | | GTGACCGCTGCGGACACGGCCGTGTATTACTGTGCGAGGTCAC |
| | | | GTGGATACCGCTATGGTCCCTTTGACTACTGGGGCCAGGGAAC |
| | | | CCTGGTCACCGTCTCCTCAGCTAGCACTAAAGGGCCTTCTGTA |
| | | | TTTCCCTTGGCCCCGTCCAGCAAATCGACCTCGGGAGGGACAG |
| | | | CCGCCCTGGGTTGCCTTGTGAAAGATTATTTCCCTGAGCCAGT |
| | | | TACCGTAAGTTGGAACAGTGGGGCGCTGACAAGTGGTGTGCA |
| | | | CACGTTTCCTGCCGTCCTGCAATCATCGGGCTTGTATAGCCTCA |
| | | | GCTCTGTGGTCACTGTCCCAAGTTCATCGCTGGGCACTCAGAC |
| | | | GTATATTTGCAATGTGAACCACAAACCTTCAAATACAAAAGTG |
| | | | GATAAACGCGTAGAACCGAAATCGTGTGATAAAACTCACACA |
| | | | TGCCCGCCATGCCCGGCACCTGAACTGCTTGGTGGTCCCAGCG |
| | | | TGTTCCTGTTCCCGCCGAAGCCTAAAGATACTCTAATGATCAG |
| | | | CCGTACGCCAGAGGTGACATGTGTCGTGGTTGACGTGTCCCAC |
| | | | GAAGATCCCGAAGTTAAGTTCAATTGGTATGTTGATGGTGTAG |
| | | | AGGTACACAATGCTAAGACTAAACCTCGCGAGGAGCAGTACG |
| | | | CCTCGACCTATCGTGTCGTGAGCGTTCTGACCGTCCTTCACCA |
| | | | AGATTGGCTTAACGGCAAAGAATATAAGTGCAAGGTAAGCAA |
| | | | TAAAGCACTTCCGGCCCCAATCGAGAAAACCATTTCCAAGGCC |
| | | | AAAGGTCAACCAAGAGAACCCCAGGTGTATACTCTTCCGCCTT |
| | | | CTCGTGAGGAAATGACTAAAAATCAAGTATCCCTTACGTGTCT |
| | | | GGTTAAAGGTTTTTATCCTAGCGATATTGCTGTTGAATGGGAA |
| | | | TCGAACGGTCAGCCGGAGAATAATTATAAAACAACGCCACCC |
| | | | GTCCTGGATAGCGACGGCTCATTTTTTCTGTATAGCAAACTGA |
| | | | CTGTAGATAAATCACGGTGGCAGCAGGGCAATGTATTCAGTTG |
| | | | CTCCGTTATGCATGAAGCGTTACATAATCACTACACGCAGAAA |
| | | | TCTCTTAGTCTTTCACCCGGT |
| 1414 | ATX-P-3418 | HC IgG1 Fc nt | CAGGTGCAGCTGGTGCAATCTGGGTCTGAGTTGAAGAAGCCTG |
| | | | GGGCCTCAGTGAAGGTTTCCTGCGAGGCTTCTGGATACACCTT |
| | | | CACTAGCTATGCTATGAATTGGGTGCGACAGGCCCCTGGACAA |
| | | | GGGCTTGAGTGGATGGGATGGATCAACACCAACACTGGGACC |
| | | | CCAACTTATGCCCAGGGCTTCACAGGACGGTTTGTCTTCTCCTT |
| | | | GGACACCTCTGTCAGCACGGCATATCTGCAGATCAGCAGCCTA |
| | | | AAGGCTGAGGACACTGCCGTGTATTACTGTGCGAGTCATAGCA |
| | | | CCTCGTTTGACTACTGGGGCCAGGGGACCCTGGTCACCGTCTC |
| | | | CTCAGCTAGCACTAAAGGGCCTTCTGTATTTCCCTTGGCCCCGT |
| | | | CCAGCAAATCGACCTCGGGAGGGACAGCCGCCCTGGGTTGCC |
| | | | TTGTGAAAGATTATTTCCCTGAGCCAGTTACCGTAAGTTGGAA |
| | | | CAGTGGGGCGCTGACAAGTGGTGTGCACACGTTTCCTGCCGTC |
| | | | CTGCAATCATCGGGCTTGTATAGCCTCAGCTCTGTGGTCACTG |
| | | | TCCCAAGTTCATCGCTGGGCACTCAGACGTATATTTGCAATGT |
| | | | GAACCACAAACCTTCAAATACAAAAGTGGATAAACGCGTAGA |
| | | | ACCGAAATCGTGTGATAAAACTCACACATGCCCGCCATGCCCG |
| | | | GCACCTGAACTGCTTGGTGGTCCCAGCGTGTTCCTGTTCCCGC |
| | | | CGAAGCCTAAAGATACTCTAATGATCAGCCGTACGCCAGAGG |
| | | | TGACATGTGTCGTGGTTGACGTGTCCCACGAAGATCCCGAAGT |
| | | | TAAGTTCAATTGGTATGTTGATGGTGTAGAGGTACACAATGCT |
| | | | AAGACTAAACCTCGCGAGGAGCAGTACGCCTCGACCTATCGT |
| | | | GTCGTGAGCGTTCTGACCGTCCTTCACCAAGATTGGCTTAACG |
| | | | GCAAAGAATATAAGTGCAAGGTAAGCAATAAAGCACTTCCGG |
| | | | CCCCAATCGAGAAAACCATTTCCAAGGCCAAAGGTCAACCAA |
| | | | GAGAACCCCAGGTGTATACTCTTCCGCCTTCTCGTGAGGAAAT |
| | | | GACTAAAAATCAAGTATCCCTTACGTGTCTGGTTAAAGGTTTT |
| | | | TATCCTAGCGATATTGCTGTTGAATGGGAATCGAACGGTCAGC |
| | | | CGGAGAATAATTATAAAACAACGCCACCCGTCCTGGATAGCG |
| | | | ACGGCTCATTTTTTCTGTATAGCAAACTGACTGTAGATAAATC |
| | | | ACGGTGGCAGCAGGGCAATGTATTCAGTTGCTCCGTTATGCAT |
| | | | GAAGCGTTACATAATCACTACACGCAGAAATCTCTTAGTCTTT |
| | | | CACCCGGT |
| 1415 | ATX-P-3420 | HC IgG1 Fc nt | CAGGTGCAGCTACAGCAGTGGGGCGCAGGACTGGTGAAGCCT |
| | | | TCGGAGACCCTGTCCCTCACCTGCGCTGTCCATGGTGGGTCCT |
| | | | TCAGTGATTACTACTTGACCTGGATTCGCCAGCCCCCAGGGAA |
| | | | GGGGCTGGAGTGGATTGGGGAAATCAATCATAGTGGAAGCAC |
| | | | CAACTACAACCCCTCCCTCAAGAGTCGAGTCACCTTATCAATA |
| | | | GACACGTCCAAGAACCAGTTCTCCCTGAAGCTGAGCTCTGTGA |
| | | | CCGCCGCGGACACGGCTGTGTATTACTGTGCGAGAGGTAGTGA |
| | | | AGACTACTACTATTACATGGACGTCTGGGGCAAAGGGACCAC |
| | | | GGTCACCGTCTCCTCAGCTAGCACTAAAGGGCCTTCTGTATTT |
| | | | CCCTTGGCCCCGTCCAGCAAATCGACCTCGGGAGGGACAGCC |
| | | | GCCCTGGGTTGCCTTGTGAAAGATTATTTCCCTGAGCCAGTTA |
| | | | CCGTAAGTTGGAACAGTGGGGCGCTGACAAGTGGTGTGCACA |
| | | | CGTTTCCTGCCGTCCTGCAATCATCGGGCTTGTATAGCCTCAGC |
| | | | TCTGTGGTCACTGTCCCAAGTTCATCGCTGGGCACTCAGACGT |
| | | | ATATTTGCAATGTGAACCACAAACCTTCAAATACAAAAGTGGA |
| | | | TAAACGCGTAGAACCGAAATCGTGTGATAAAACTCACACATG |
| | | | CCCGCCATGCCCGGCACCTGAACTGCTTGGTGGTCCCAGCGTG |
| | | | TTCCTGTTCCCGCCGAAGCCTAAAGATACTCTAATGATCAGCC |
| | | | GTACGCCAGAGGTGACATGTGTCGTGGTTGACGTGTCCCACGA |
| | | | AGATCCCGAAGTTAAGTTCAATTGGTATGTTGATGGTGTAGAG |
| | | | GTACACAATGCTAAGACTAAACCTCGCGAGGAGCAGTACGCC |
| | | | TCGACCTATCGTGTCGTGAGCGTTCTGACCGTCCTTCACCAAG |
| | | | ATTGGCTTAACGGCAAAGAATATAAGTGCAAGGTAAGCAATA |
| | | | AAGCACTTCCGGCCCCAATCGAGAAAACCATTTCCAAGGCCA |
| | | | AAGGTCAACCAAGAGAACCCCAGGTGTATACTCTTCCGCCTTC |
| | | | TCGTGAGGAAATGACTAAAAATCAAGTATCCCTTACGTGTCTG |
| | | | GTTAAAGGTTTTTATCCTAGCGATATTGCTGTTGAATGGGAAT |
| | | | CGAACGGTCAGCCGGAGAATAATTATAAAACAACGCCACCCG |
| | | | TCCTGGATAGCGACGGCTCATTTTTTCTGTATAGCAAACTGAC |
| | | | TGTAGATAAATCACGGTGGCAGCAGGGCAATGTATTCAGTTGC |
| | | | TCCGTTATGCATGAAGCGTTACATAATCACTACACGCAGAAAT |
| | | | CTCTTAGTCTTTCACCCGGT |
| 1416 | ATX-P-3426 | HC IgG1 Fc nt | GAGGTGCAGCTGGTGCAGTCTGGAGCAGAGGTGAAAAAGCCC |
| | | | GGGGAGTCTCTGAAGATCTCCTGTAAGGGTTCTGGATACATCT |
| | | | TTACCAGCTACTGGATCGGCTGGGTGCGCCAGATGCCCGGGAA |
| | | | AGGCCTGGAGTGGATGGGGATCATCTATCCTGGTGACTCTGAT |
| | | | ACCAGATACAGCCCGTCTTTCCAAGGCCAGGTCACCATCTCAG |
| | | | CCGACAAGTCCATCATCACCGCCTACCTGCAGTGGAGCAGCCT |
| | | | GAAGGCCTCGGACACCGCCATGTATTACTGTGCGAGACACGA |
| | | | CTACTTTGATATTGGAGGTTATTTTGACTACTGGGGCCAGGGA |
| | | | ACCCTGGTCACCGTCTCCTCAGCTAGCACTAAAGGGCCTTCTG |
| | | | TATTTCCCTTGGCCCCGTCCAGCAAATCGACCTCGGGAGGGAC |
| | | | AGCCGCCCTGGGTTGCCTTGTGAAAGATTATTTCCCTGAGCCA |
| | | | GTTACCGTAAGTTGGAACAGTGGGGCGCTGACAAGTGGTGTG |
| | | | CACACGTTTCCTGCCGTCCTGCAATCATCGGGCTTGTATAGCCT |
| | | | CAGCTCTGTGGTCACTGTCCCAAGTTCATCGCTGGGCACTCAG |
| | | | ACGTATATTTGCAATGTGAACCACAAACCTTCAAATACAAAAG |
| | | | TGGATAAACGCGTAGAACCGAAATCGTGTGATAAAACTCACA |
| | | | CATGCCCGCCATGCCCGGCACCTGAACTGCTTGGTGGTCCCAG |
| | | | CGTGTTCCTGTTCCCGCCGAAGCCTAAAGATACTCTAATGATC |
| | | | AGCCGTACGCCAGAGGTGACATGTGTCGTGGTTGACGTGTCCC |
| | | | ACGAAGATCCCGAAGTTAAGTTCAATTGGTATGTTGATGGTGT |
| | | | AGAGGTACACAATGCTAAGACTAAACCTCGCGAGGAGCAGTA |
| | | | CGCCTCGACCTATCGTGTCGTGAGCGTTCTGACCGTCCTTCACC |
| | | | AAGATTGGCTTAACGGCAAAGAATATAAGTGCAAGGTAAGCA |
| | | | ATAAAGCACTTCCGGCCCCAATCGAGAAAACCATTTCCAAGGC |
| | | | CAAAGGTCAACCAAGAGAACCCCAGGTGTATACTCTTCCGCCT |
| | | | TCTCGTGAGGAAATGACTAAAAATCAAGTATCCCTTACGTGTC |
| | | | TGGTTAAAGGTTTTTATCCTAGCGATATTGCTGTTGAATGGGA |
| | | | ATCGAACGGTCAGCCGGAGAATAATTATAAAACAACGCCACC |
| | | | CGTCCTGGATAGCGACGGCTCATTTTTTCTGTATAGCAAACTG |
| | | | ACTGTAGATAAATCACGGTGGCAGCAGGGCAATGTATTCAGTT |
| | | | GCTCCGTTATGCATGAAGCGTTACATAATCACTACACGCAGAA |
| | | | ATCTCTTAGTCTTTCACCCGGT |
| 1417 | ATX-P-3432 | HC IgG1 Fc nt | CAGGTGCAGCTGGTGCAGTCTGGGGCTGAGGTGAAGAAGCCT |
| | | | GGGGCCTCAGTGAAGGTCTCCTGCAAGGCTGATGGATACACCT |
| | | | TCACCGACTACTATATGCACTGGGTGCGACAGGCCCCTGGACA |
| | | | AGGGCATGAGTGGATGGGATGGATCAACCCTAACAGTGGTGT |
| | | | CACATACTATGCACAGAAGTTTCAGGGCAGGGTCACCATGACC |
| | | | AGGGACACGTCCATCAGCACAGCCTACATGGAGCTGAACAGA |
| | | | CTTAGATCTGACGACACGGCCGTGTATTACTGTGCGAGAGATC |
| | | | GGACCTTCTACTTTGACTACTGGGGCCAGGGAACCCTGGTCAC |
| | | | TGTCTCCTCAGCTAGCACTAAAGGGCCTTCTGTATTTCCCTTGG |
| | | | CCCCGTCCAGCAAATCGACCTCGGGAGGGACAGCCGCCCTGG |
| | | | GTTGCCTTGTGAAAGATTATTTCCCTGAGCCAGTTACCGTAAG |
| | | | TTGGAACAGTGGGGCGCTGACAAGTGGTGTGCACACGTTTCCT |
| | | | GCCGTCCTGCAATCATCGGGCTTGTATAGCCTCAGCTCTGTGG |
| | | | TCACTGTCCCAAGTTCATCGCTGGGCACTCAGACGTATATTTG |
| | | | CAATGTGAACCACAAACCTTCAAATACAAAAGTGGATAAACG |
| | | | CGTAGAACCGAAATCGTGTGATAAAACTCACACATGCCCGCC |
| | | | ATGCCCGGCACCTGAACTGCTTGGTGGTCCCAGCGTGTTCCTG |
| | | | TTCCCGCCGAAGCCTAAAGATACTCTAATGATCAGCCGTACGC |
| | | | CAGAGGTGACATGTGTCGTGGTTGACGTGTCCCACGAAGATCC |
| | | | CGAAGTTAAGTTCAATTGGTATGTTGATGGTGTAGAGGTACAC |
| | | | AATGCTAAGACTAAACCTCGCGAGGAGCAGTACGCCTCGACC |
| | | | TATCGTGTCGTGAGCGTTCTGACCGTCCTTCACCAAGATTGGC |
| | | | TTAACGGCAAAGAATATAAGTGCAAGGTAAGCAATAAAGCAC |
| | | | TTCCGGCCCCAATCGAGAAAACCATTTCCAAGGCCAAAGGTCA |
| | | | ACCAAGAGAACCCCAGGTGTATACTCTTCCGCCTTCTCGTGAG |
| | | | GAAATGACTAAAAATCAAGTATCCCTTACGTGTCTGGTTAAAG |
| | | | GTTTTTATCCTAGCGATATTGCTGTTGAATGGGAATCGAACGG |
| | | | TCAGCCGGAGAATAATTATAAAACAACGCCACCCGTCCTGGAT |
| | | | AGCGACGGCTCATTTTTTCTGTATAGCAAACTGACTGTAGATA |
| | | | AATCACGGTGGCAGCAGGGCAATGTATTCAGTTGCTCCGTTAT |
| | | | GCATGAAGCGTTACATAATCACTACACGCAGAAATCTCTTAGT |
| | | | CTTTCACCCGGT |
| 1418 | ATX-P-3433 | HC IgG1 Fc nt | CAGGTGCAGCTGGTGCAGTCTGGGGCTGAGGTGAAGAAGCCT |
| | | | GGGGCCTCAGTGAAGGTCTCCTGCAAGGCTTCTGGATACACCT |
| | | | TCACCGACTACTATATGCACTGGGTGCGACAGGCCCCTGGACA |
| | | | AGGGCTTGAGTGGATGGGATGGATCAACCCTAACAATGGTGG |
| | | | CACAGACTATGCACAGAAGTTTCAGGGCAGGGTCACCATGAC |
| | | | CAGGGACACGTCCATCAGCACAGCCTACATGGAGTTACACAG |
| | | | GCTAAGATCTGACGACACGGCCGTGTATTTCTGTGCGAGAGGG |
| | | | GTCTATGATGTAGTAGTTCCAACTGCTATCGTCAACTGGTTCG |
| | | | ACCCCTGGGGCCAGGGAACCCTGGTCACCGTCTCCTCAGCTAG |
| | | | CACTAAAGGGCCTTCTGTATTTCCCTTGGCCCCGTCCAGCAAA |
| | | | TCGACCTCGGGAGGGACAGCCGCCCTGGGTTGCCTTGTGAAAG |
| | | | ATTATTTCCCTGAGCCAGTTACCGTAAGTTGGAACAGTGGGGC |
| | | | GCTGACAAGTGGTGTGCACACGTTTCCTGCCGTCCTGCAATCA |
| | | | TCGGGCTTGTATAGCCTCAGCTCTGTGGTCACTGTCCCAAGTTC |
| | | | ATCGCTGGGCACTCAGACGTATATTTGCAATGTGAACCACAAA |
| | | | CCTTCAAATACAAAAGTGGATAAACGCGTAGAACCGAAATCG |
| | | | TGTGATAAAACTCACACATGCCCGCCATGCCCGGCACCTGAAC |
| | | | TGCTTGGTGGTCCCAGCGTGTTCCTGTTCCCGCCGAAGCCTAA |
| | | | AGATACTCTAATGATCAGCCGTACGCCAGAGGTGACATGTGTC |
| | | | GTGGTTGACGTGTCCCACGAAGATCCCGAAGTTAAGTTCAATT |
| | | | GGTATGTTGATGGTGTAGAGGTACACAATGCTAAGACTAAACC |
| | | | TCGCGAGGAGCAGTACGCCTCGACCTATCGTGTCGTGAGCGTT |
| | | | CTGACCGTCCTTCACCAAGATTGGCTTAACGGCAAAGAATATA |
| | | | AGTGCAAGGTAAGCAATAAAGCACTTCCGGCCCCAATCGAGA |
| | | | AAACCATTTCCAAGGCCAAAGGTCAACCAAGAGAACCCCAGG |
| | | | TGTATACTCTTCCGCCTTCTCGTGAGGAAATGACTAAAAATCA |
| | | | AGTATCCCTTACGTGTCTGGTTAAAGGTTTTTATCCTAGCGATA |
| | | | TTGCTGTTGAATGGGAATCGAACGGTCAGCCGGAGAATAATTA |
| | | | TAAAACAACGCCACCCGTCCTGGATAGCGACGGCTCATTTTTT |
| | | | CTGTATAGCAAACTGACTGTAGATAAATCACGGTGGCAGCAG |
| | | | GGCAATGTATTCAGTTGCTCCGTTATGCATGAAGCGTTACATA |
| | | | ATCACTACACGCAGAAATCTCTTAGTCTTTCACCCGGT |
| 1419 | ATX-P-3438 | HC IgG1 Fc nt | CAGGTGCAGCTGCAGGAGTCGGGCCCAGGACTGGTGAAGCCT |
| | | | TCGGGGACCCTGTCCCTCACCTGCGCTGTCTCTGGTGACTCCAT |
| | | | CAGCAATGATTACTGGTGGAATTGGGTCCGCCAGCCCCCAGGG |
| | | | AAGGGTCTGGAGTGGATTGGAGAAATCTATCATAGTGGGCAC |
| | | | ACCAACTACAACCCGTCCCTCAAGAGTCGAGTCACCATATCAG |
| | | | TAGACAAGTCCAAGAACCAGTTGTCCCTGAAGCTGACCTCTGT |
| | | | GAACGCCGCGGACACGGCCGTGTATTACTGTGCGAGAGGTGG |
| | | | AACTGAAATTACGGGGTACATGGACGTCTGGGGCAAAGGGAC |
| | | | CACGGTCACCGTCTCCTCAGCTAGCACTAAAGGGCCTTCTGTA |
| | | | TTTCCCTTGGCCCCGTCCAGCAAATCGACCTCGGGAGGGACAG |
| | | | CCGCCCTGGGTTGCCTTGTGAAAGATTATTTCCCTGAGCCAGT |
| | | | TACCGTAAGTTGGAACAGTGGGGCGCTGACAAGTGGTGTGCA |
| | | | CACGTTTCCTGCCGTCCTGCAATCATCGGGCTTGTATAGCCTCA |
| | | | GCTCTGTGGTCACTGTCCCAAGTTCATCGCTGGGCACTCAGAC |
| | | | GTATATTTGCAATGTGAACCACAAACCTTCAAATACAAAAGTG |
| | | | GATAAACGCGTAGAACCGAAATCGTGTGATAAAACTCACACA |
| | | | TGCCCGCCATGCCCGGCACCTGAACTGCTTGGTGGTCCCAGCG |
| | | | TGTTCCTGTTCCCGCCGAAGCCTAAAGATACTCTAATGATCAG |
| | | | CCGTACGCCAGAGGTGACATGTGTCGTGGTTGACGTGTCCCAC |
| | | | GAAGATCCCGAAGTTAAGTTCAATTGGTATGTTGATGGTGTAG |
| | | | AGGTACACAATGCTAAGACTAAACCTCGCGAGGAGCAGTACG |
| | | | CCTCGACCTATCGTGTCGTGAGCGTTCTGACCGTCCTTCACCA |
| | | | AGATTGGCTTAACGGCAAAGAATATAAGTGCAAGGTAAGCAA |
| | | | TAAAGCACTTCCGGCCCCAATCGAGAAAACCATTTCCAAGGCC |
| | | | AAAGGTCAACCAAGAGAACCCCAGGTGTATACTCTTCCGCCTT |
| | | | CTCGTGAGGAAATGACTAAAAATCAAGTATCCCTTACGTGTCT |
| | | | GGTTAAAGGTTTTTATCCTAGCGATATTGCTGTTGAATGGGAA |
| | | | TCGAACGGTCAGCCGGAGAATAATTATAAAACAACGCCACCC |
| | | | GTCCTGGATAGCGACGGCTCATTTTTTCTGTATAGCAAACTGA |
| | | | CTGTAGATAAATCACGGTGGCAGCAGGGCAATGTATTCAGTTG |
| | | | CTCCGTTATGCATGAAGCGTTACATAATCACTACACGCAGAAA |
| | | | TCTCTTAGTCTTTCACCCGGT |
| 1420 | ATX-P-3441 | HC IgG1 Fc nt | CAGGTGCAGCTGCAGGAGTCGGGCCCAGGACTGGTGAAGCCT |
| | | | TCGGGGACCCTGTCCCTCACCTGCGCTGTCTCTGGTGCCTCCAT |
| | | | CAGAAGTGGTCACTGGTGGAGTTGGGTCCGCCAGCCCCCAGG |
| | | | GAAGGGACTGGAGTGGATTGGGGAAATCTATCATAGTGGGAA |
| | | | CACCAACTACAACCCGTCCCTCAAGAGTCGAGTCACCCTATCA |
| | | | GTAGACAAGTCCAAGAACCAGTTCTCCCTGAAGCTGAGCTCTG |
| | | | TGACCGCCGCGGACACGGCCGTGTATTACTGTGCGAGAGGTCA |
| | | | CTACGGTGACTACGTCGTCTACTTTGACTACTGGGGCCAGGGA |
| | | | ACCCTGGTCACTGTCTCCTCAGCTAGCACTAAAGGGCCTTCTG |
| | | | TATTTCCCTTGGCCCCGTCCAGCAAATCGACCTCGGGAGGGAC |
| | | | AGCCGCCCTGGGTTGCCTTGTGAAAGATTATTTCCCTGAGCCA |
| | | | GTTACCGTAAGTTGGAACAGTGGGGCGCTGACAAGTGGTGTG |
| | | | CACACGTTTCCTGCCGTCCTGCAATCATCGGGCTTGTATAGCCT |
| | | | CAGCTCTGTGGTCACTGTCCCAAGTTCATCGCTGGGCACTCAG |
| | | | ACGTATATTTGCAATGTGAACCACAAACCTTCAAATACAAAAG |
| | | | TGGATAAACGCGTAGAACCGAAATCGTGTGATAAAACTCACA |
| | | | CATGCCCGCCATGCCCGGCACCTGAACTGCTTGGTGGTCCCAG |
| | | | CGTGTTCCTGTTCCCGCCGAAGCCTAAAGATACTCTAATGATC |
| | | | AGCCGTACGCCAGAGGTGACATGTGTCGTGGTTGACGTGTCCC |
| | | | ACGAAGATCCCGAAGTTAAGTTCAATTGGTATGTTGATGGTGT |
| | | | AGAGGTACACAATGCTAAGACTAAACCTCGCGAGGAGCAGTA |
| | | | CGCCTCGACCTATCGTGTCGTGAGCGTTCTGACCGTCCTTCACC |
| | | | AAGATTGGCTTAACGGCAAAGAATATAAGTGCAAGGTAAGCA |
| | | | ATAAAGCACTTCCGGCCCCAATCGAGAAAACCATTTCCAAGGC |
| | | | CAAAGGTCAACCAAGAGAACCCCAGGTGTATACTCTTCCGCCT |
| | | | TCTCGTGAGGAAATGACTAAAAATCAAGTATCCCTTACGTGTC |
| | | | TGGTTAAAGGTTTTTATCCTAGCGATATTGCTGTTGAATGGGA |
| | | | ATCGAACGGTCAGCCGGAGAATAATTATAAAACAACGCCACC |
| | | | CGTCCTGGATAGCGACGGCTCATTTTTTCTGTATAGCAAACTG |
| | | | ACTGTAGATAAATCACGGTGGCAGCAGGGCAATGTATTCAGTT |
| | | | GCTCCGTTATGCATGAAGCGTTACATAATCACTACACGCAGAA |
| | | | ATCTCTTAGTCTTTCACCCGGT |
| 1421 | ATX-P-3446 | HC IgG1 Fc nt | CAGGTGCAGCTGCAGGAGTCGGGCCCAGGACTGGTGAAGCCT |
| | | | TCGGAGACCCTGTCCCTCACCTGCACTGTCTCTGGTGGCTCCAT |
| | | | CAGTAGTTACTATTGGAGCTGGATCCGGCAGCCCCCAGGGAA |
| | | | GGGACTGGAATGGATTGGTTATGTCTATTACAGTGGGTACACC |
| | | | AAGTACAATCCCTCCCTCAAGAGTCGAGTCACCATATCAATAG |
| | | | ACGCGTCCAAGAACCAGTTCTCCCTGAAGCTGACCTCTGTGAC |
| | | | CGCTGCGGACACGGCCGTGTATTACTGTGCGACCGTCGAATCA |
| | | | AAGTGGAACTACGGGCCTTTTGCTATCTGGGGACAAGGGACA |
| | | | ATGGTCACCGTCTCTTCAGCTAGCACTAAAGGGCCTTCTGTAT |
| | | | TTCCCTTGGCCCCGTCCAGCAAATCGACCTCGGGAGGGACAGC |
| | | | CGCCCTGGGTTGCCTTGTGAAAGATTATTTCCCTGAGCCAGTT |
| | | | ACCGTAAGTTGGAACAGTGGGGCGCTGACAAGTGGTGTGCAC |
| | | | ACGTTTCCTGCCGTCCTGCAATCATCGGGCTTGTATAGCCTCA |
| | | | GCTCTGTGGTCACTGTCCCAAGTTCATCGCTGGGCACTCAGAC |
| | | | GTATATTTGCAATGTGAACCACAAACCTTCAAATACAAAAGTG |
| | | | GATAAACGCGTAGAACCGAAATCGTGTGATAAAACTCACACA |
| | | | TGCCCGCCATGCCCGGCACCTGAACTGCTTGGTGGTCCCAGCG |
| | | | TGTTCCTGTTCCCGCCGAAGCCTAAAGATACTCTAATGATCAG |
| | | | CCGTACGCCAGAGGTGACATGTGTCGTGGTTGACGTGTCCCAC |
| | | | GAAGATCCCGAAGTTAAGTTCAATTGGTATGTTGATGGTGTAG |
| | | | AGGTACACAATGCTAAGACTAAACCTCGCGAGGAGCAGTACG |
| | | | CCTCGACCTATCGTGTCGTGAGCGTTCTGACCGTCCTTCACCA |
| | | | AGATTGGCTTAACGGCAAAGAATATAAGTGCAAGGTAAGCAA |
| | | | TAAAGCACTTCCGGCCCCAATCGAGAAAACCATTTCCAAGGCC |
| | | | AAAGGTCAACCAAGAGAACCCCAGGTGTATACTCTTCCGCCTT |
| | | | CTCGTGAGGAAATGACTAAAAATCAAGTATCCCTTACGTGTCT |
| | | | GGTTAAAGGTTTTTATCCTAGCGATATTGCTGTTGAATGGGAA |
| | | | TCGAACGGTCAGCCGGAGAATAATTATAAAACAACGCCACCC |
| | | | GTCCTGGATAGCGACGGCTCATTTTTTCTGTATAGCAAACTGA |
| | | | CTGTAGATAAATCACGGTGGCAGCAGGGCAATGTATTCAGTTG |
| | | | CTCCGTTATGCATGAAGCGTTACATAATCACTACACGCAGAAA |
| | | | TCTCTTAGTCTTTCACCCGGT |
| 1422 | ATX-P-3452 | HC IgG1 Fc nt | CAGGTGCAGCTGGTGCAGTCTGGGGCTGAGGTGAAGAAGCCT |
| | | | GGGGCCTCAGTGAAGGTCTCCTGCAAGGCTTCTGGATACACCT |
| | | | TCACCGGCTACTATATGAACTGGGTGCGACAGGCCCCTGGACA |
| | | | AGGGCTTGAGTGGATGGGATGGATCAACCCTAACAGTGGTGC |
| | | | CACAAACTATGCACAGAAGTTTCAGGGCAGGGTCACCATGAC |
| | | | CAGGGACACGTCCATCAGCACAGACTACATGGAACTGAGCAG |
| | | | GCTGAGATCTGACGACACGGCCGTTTATTACTGTGCGAGAGAT |
| | | | GGGGCTAAGTGGAATCACGAGGGTTACTACTTTGACTACTGGG |
| | | | GCCAGGGAACCCTGGTCACCGTCTCCTCAGCTAGCACTAAAGG |
| | | | GCCTTCTGTATTTCCCTTGGCCCCGTCCAGCAAATCGACCTCGG |
| | | | GAGGGACAGCCGCCCTGGGTTGCCTTGTGAAAGATTATTTCCC |
| | | | TGAGCCAGTTACCGTAAGTTGGAACAGTGGGGCGCTGACAAG |
| | | | TGGTGTGCACACGTTTCCTGCCGTCCTGCAATCATCGGGCTTGT |
| | | | ATAGCCTCAGCTCTGTGGTCACTGTCCCAAGTTCATCGCTGGG |
| | | | CACTCAGACGTATATTTGCAATGTGAACCACAAACCTTCAAAT |
| | | | ACAAAAGTGGATAAACGCGTAGAACCGAAATCGTGTGATAAA |
| | | | ACTCACACATGCCCGCCATGCCCGGCACCTGAACTGCTTGGTG |
| | | | GTCCCAGCGTGTTCCTGTTCCCGCCGAAGCCTAAAGATACTCT |
| | | | AATGATCAGCCGTACGCCAGAGGTGACATGTGTCGTGGTTGAC |
| | | | GTGTCCCACGAAGATCCCGAAGTTAAGTTCAATTGGTATGTTG |
| | | | ATGGTGTAGAGGTACACAATGCTAAGACTAAACCTCGCGAGG |
| | | | AGCAGTACGCCTCGACCTATCGTGTCGTGAGCGTTCTGACCGT |
| | | | CCTTCACCAAGATTGGCTTAACGGCAAAGAATATAAGTGCAA |
| | | | GGTAAGCAATAAAGCACTTCCGGCCCCAATCGAGAAAACCAT |
| | | | TTCCAAGGCCAAAGGTCAACCAAGAGAACCCCAGGTGTATAC |
| | | | TCTTCCGCCTTCTCGTGAGGAAATGACTAAAAATCAAGTATCC |
| | | | CTTACGTGTCTGGTTAAAGGTTTTTATCCTAGCGATATTGCTGT |
| | | | TGAATGGGAATCGAACGGTCAGCCGGAGAATAATTATAAAAC |
| | | | AACGCCACCCGTCCTGGATAGCGACGGCTCATTTTTTCTGTAT |
| | | | AGCAAACTGACTGTAGATAAATCACGGTGGCAGCAGGGCAAT |
| | | | GTATTCAGTTGCTCCGTTATGCATGAAGCGTTACATAATCACT |
| | | | ACACGCAGAAATCTCTTAGTCTTTCACCCGGT |
| 1423 | ATX-P-3360 | HC IgG1-Fc aa | QVQLQESGPGLVKPSGTLSLTCAVSGGSISINNWWSWVRQPPGK |
| | | | GLEWLGKIYHSGNTDYNPSLKSRVTISVDKSKNQFSLRLSSVTAA |
| | | | DTAVYYCASGSDYDFWSGYLDYWGQGTLVTVSSASTKGPSVFP |
| | | | LAPSSKSTSGGTAALGCLVKDYFPEPVTVSWNSGALTSGVHTFPA |
| | | | VLQSSGLYSLSSVVTVPSSSLGTQTYICNVNHKPSNTKVDKRVEP |
| | | | KSCDKTHTCPPCPAPELLGGPSVFLFPPKPKDTLMISRTPEVTCVV |
| | | | VDVSHEDPEVKFNWYVDGVEVHNAKTKPREEQYASTYRVVSVL |
| | | | TVLHQDWLNGKEYKCKVSNKALPAPIEKTISKAKGQPREPQVYT |
| | | | LPPSREEMTKNQVSLTCLVKGFYPSDIAVEWESNGQPENNYKTTP |
| | | | PVLDSDGSFFLYSKLTVDKSRWQQGNVFSCSVMHEALHNHYTQ |
| | | | KSLSLSPG |
| 1424 | ATX-P-3362 | HC IgG1-Fc aa | EVQLVESGGGLVQPGRSLRLSCAASGFTFDDYAMHWVRQAPGK |
| | | | GLEWVSGISWNSGSIAYADSVKGRFTISRDNAKNSLYLQMNSLR |
| | | | VEDTAFFYCARVAAAAGIPFFDYWGQGTLVTVSSASTKGPSVFPL |
| | | | APSSKSTSGGTAALGCLVKDYFPEPVTVSWNSGALTSGVHTFPAV |
| | | | LQSSGLYSLSSVVTVPSSSLGTQTYICNVNHKPSNTKVDKRVEPK |
| | | | SCDKTHTCPPCPAPELLGGPSVFLFPPKPKDTLMISRTPEVTCVVV |
| | | | DVSHEDPEVKFNWYVDGVEVHNAKTKPREEQYASTYRVVSVLT |
| | | | VLHQDWLNGKEYKCKVSNKALPAPIEKTISKAKGQPREPQVYTL |
| | | | PPSREEMTKNQVSLTCLVKGFYPSDIAVEWESNGQPENNYKTTPP |
| | | | VLDSDGSFFLYSKLTVDKSRWQQGNVFSCSVMHEALHNHYTQK |
| | | | SLSLSPG |
| 1425 | ATX-P-3363 | HC IgG1-Fc aa | QVQLQESGPGLVKPSGTLTLTCAVSGGSINRDNWWSWVRQPPGK |
| | | | GLEWIGQIYQSGSTNYNPSLKSRVTISVDKSKNQFSLKLSSVTAAD |
| | | | TAVYYCARVYDWNYGGHFDYWGQGTLVTVSSASTKGPSVFPLA |
| | | | PSSKSTSGGTAALGCLVKDYFPEPVTVSWNSGALTSGVHTFPAVL |
| | | | QSSGLYSLSSVVTVPSSSLGTQTYICNVNHKPSNTKVDKRVEPKS |
| | | | CDKTHTCPPCPAPELLGGPSVFLFPPKPKDTLMISRTPEVTCVVVD |
| | | | VSHEDPEVKFNWYVDGVEVHNAKTKPREEQYASTYRVVSVLTV |
| | | | LHQDWLNGKEYKCKVSNKALPAPIEKTISKAKGQPREPQVYTLPP |
| | | | SREEMTKNQVSLTCLVKGFYPSDIAVEWESNGQPENNYKTTPPV |
| | | | LDSDGSFFLYSKLTVDKSRWQQGNVFSCSVMHEALHNHYTQKSL |
| | | | SLSPG |
| 1426 | ATX-P-3365 | HC IgG1-Fc aa | QVQLQESGPGLVKPSGTLSLTCAVSGDSISSNNWWSWVRQPPGK |
| | | | GLEWIGQIYHSGHTNYNPSLKSRVTISVDMSKNQFSLKLTSVTAA |
| | | | DTAVYYCARGATEILGYFDLWGRGTLVTVSSASTKGPSVFPLAPS |
| | | | SKSTSGGTAALGCLVKDYFPEPVTVSWNSGALTSGVHTFPAVLQ |
| | | | SSGLYSLSSVVTVPSSSLGTQTYICNVNHKPSNTKVDKRVEPKSC |
| | | | DKTHTCPPCPAPELLGGPSVFLFPPKPKDTLMISRTPEVTCVVVDV |
| | | | SHEDPEVKFNWYVDGVEVHNAKTKPREEQYASTYRVVSVLTVL |
| | | | HQDWLNGKEYKCKVSNKALPAPIEKTISKAKGQPREPQVYTLPPS |
| | | | REEMTKNQVSLTCLVKGFYPSDIAVEWESNGQPENNYKTTPPVL |
| | | | DSDGSFFLYSKLTVDKSRWQQGNVFSCSVMHEALHNHYTQKSLS |
| | | | LSPG |
| 1427 | ATX-P-3367 | HC IgG1-Fc aa | QVQLQESGPGLVKPSETLSLTCTVSGGSVSSGSYYWSWIRQPPGK |
| | | | GLEWIGYIYKSGFTNYNPSLKSRVTISVDTSKNQFSLKLSSVTAAD |
| | | | TAVYYCAIGGRGYSYGPFDYWGQGTLVTVSSASTKGPSVFPLAP |
| | | | SSKSTSGGTAALGCLVKDYFPEPVTVSWNSGALTSGVHTFPAVL |
| | | | QSSGLYSLSSVVTVPSSSLGTQTYICNVNHKPSNTKVDKRVEPKS |
| | | | CDKTHTCPPCPAPELLGGPSVFLFPPKPKDTLMISRTPEVTCVVVD |
| | | | VSHEDPEVKFNWYVDGVEVHNAKTKPREEQYASTYRVVSVLTV |
| | | | LHQDWLNGKEYKCKVSNKALPAPIEKTISKAKGQPREPQVYTLPP |
| | | | SREEMTKNQVSLTCLVKGFYPSDIAVEWESNGQPENNYKTTPPV |
| | | | LDSDGSFFLYSKLTVDKSRWQQGNVFSCSVMHEALHNHYTQKSL |
| | | | SLSPG |
| 1428 | ATX-P-3369 | HC IgG1-Fc aa | QVQLVQSGAEVKKPGASVKVSCKASGYTFTGYYLHWVRQAPGQ |
| | | | GLEWMGWINPNSGDTNYVQNFQGRVTMTRDTSISTAYMELSRL |
| | | | RSDDTAVYYCARSYVDTSSSAFDIWGQGTMVTVSSASTKGPSVF |
| | | | PLAPSSKSTSGGTAALGCLVKDYFPEPVTVSWNSGALTSGVHTFP |
| | | | AVLQSSGLYSLSSVVTVPSSSLGTQTYICNVNHKPSNTKVDKRVE |
| | | | PKSCDKTHTCPPCPAPELLGGPSVFLFPPKPKDTLMISRTPEVTCV |
| | | | VVDVSHEDPEVKFNWYVDGVEVHNAKTKPREEQYASTYRVVSV |
| | | | LTVLHQDWLNGKEYKCKVSNKALPAPIEKTISKAKGQPREPQVY |
| | | | TLPPSREEMTKNQVSLTCLVKGFYPSDIAVEWESNGQPENNYKTT |
| | | | PPVLDSDGSFFLYSKLTVDKSRWQQGNVFSCSVMHEALHNHYTQ |
| | | | KSLSLSPG |
| 1429 | ATX-P-3370 | HC IgG1-Fc aa | QVQLQESGPGLVKPSETLSLTCTVSGGSISSYYWSWIRQPPGKGL |
| | | | EWIGYVYYSGYTKYNPSLKSRVTISVDTPKTQFSLKMSSVTAADT |
| | | | AVYYCASVESKWNYGPFDIWGQGTMVTVSSASTKGPSVFPLAPS |
| | | | SKSTSGGTAALGCLVKDYFPEPVTVSWNSGALTSGVHTFPAVLQ |
| | | | SSGLYSLSSVVTVPSSSLGTQTYICNVNHKPSNTKVDKRVEPKSC |
| | | | DKTHTCPPCPAPELLGGPSVFLFPPKPKDTLMISRTPEVTCVVVDV |
| | | | SHEDPEVKFNWYVDGVEVHNAKTKPREEQYASTYRVVSVLTVL |
| | | | HQDWLNGKEYKCKVSNKALPAPIEKTISKAKGQPREPQVYTLPPS |
| | | | REEMTKNQVSLTCLVKGFYPSDIAVEWESNGQPENNYKTTPPVL |
| | | | DSDGSFFLYSKLTVDKSRWQQGNVFSCSVMHEALHNHYTQKSLS |
| | | | LSPG |
| 1430 | ATX-P-3371 | HC IgG1-Fc aa | QVQLQESGPGLVKPSETLSLTCTVSGDSISSYYWSWIRQPPGKGL |
| | | | EWIGYIYYSGFTKYNPSLNSRVTISVDTSKSQFSLKLTSVTAADTA |
| | | | VYYCAMREPRGRYNWNYGPFDIWGQGTMVTVSSASTKGPSVFP |
| | | | LAPSSKSTSGGTAALGCLVKDYFPEPVTVSWNSGALTSGVHTFPA |
| | | | VLQSSGLYSLSSVVTVPSSSLGTQTYICNVNHKPSNTKVDKRVEP |
| | | | KSCDKTHTCPPCPAPELLGGPSVFLFPPKPKDTLMISRTPEVTCVV |
| | | | VDVSHEDPEVKFNWYVDGVEVHNAKTKPREEQYASTYRVVSVL |
| | | | TVLHQDWLNGKEYKCKVSNKALPAPIEKTISKAKGQPREPQVYT |
| | | | LPPSREEMTKNQVSLTCLVKGFYPSDIAVEWESNGQPENNYKTTP |
| | | | PVLDSDGSFFLYSKLTVDKSRWQQGNVFSCSVMHEALHNHYTQ |
| | | | KSLSLSPG |
| 1431 | ATX-P-3373 | HC IgG1-Fc aa | QVQLQESGPGLVKPSGTLSLTCAVSGGSISNDNWWSWVRQPPGK |
| | | | GLEWIGKIYHSEFTNYNPSLKSRVTISVDKSKNQFSLELNSVTAAD |
| | | | TAVYYCAREYHNFMDVWCKGTTVTVSSASTKGPSVFPLAPSSKS |
| | | | TSGGTAALGCLVKDYFPEPVTVSWNSGALTSGVHTFPAVLQSSG |
| | | | LYSLSSVVTVPSSSLGTQTYICNVNHKPSNTKVDKRVEPKSCDKT |
| | | | HTCPPCPAPELLGGPSVFLFPPKPKDTLMISRTPEVTCVVVDVSHE |
| | | | DPEVKFNWYVDGVEVHNAKTKPREEQYASTYRVVSVLTVLHQD |
| | | | WLNGKEYKCKVSNKALPAPIEKTISKAKGQPREPQVYTLPPSREE |
| | | | MTKNQVSLTCLVKGFYPSDIAVEWESNGQPENNYKTTPPVLDSD |
| | | | GSFFLYSKLTVDKSRWQQGNVFSCSVMHEALHNHYTQKSLSLSP |
| | | | G |
| 1432 | ATX-P-3375 | HC IgG1-Fc aa | QVQLQESGPGLVKPSETLSLTCTVSGDSVSSGKYFWSWIRQSPGK |
| | | | GLEWIGYIYYSGSTNYNPSLKNRVTISVDTSKKELSLKLSSVTAAD |
| | | | TAVYYCARGGHNWNYAAFDIWGQGTMVTVSSASTKGPSVFPLA |
| | | | PSSKSTSGGTAALGCLVKDYFPEPVTVSWNSGALTSGVHTFPAVL |
| | | | QSSGLYSLSSVVTVPSSSLGTQTYICNVNHKPSNTKVDKRVEPKS |
| | | | CDKTHTCPPCPAPELLGGPSVFLFPPKPKDTLMISRTPEVTCVVVD |
| | | | VSHEDPEVKFNWYVDGVEVHNAKTKPREEQYASTYRVVSVLTV |
| | | | LHQDWLNGKEYKCKVSNKALPAPIEKTISKAKGQPREPQVYTLPP |
| | | | SREEMTKNQVSLTCLVKGFYPSDIAVEWESNGQPENNYKTTPPV |
| | | | LDSDGSFFLYSKLTVDKSRWQQGNVFSCSVMHEALHNHYTQKSL |
| | | | SLSPG |
| 1433 | ATX-P-3378 | HC IgG1-Fc aa | QVQLQESGPGLVKPSGTLSLTCAVSGGSISNDNWWSWVRQSPGK |
| | | | GLEWIGKIYHSEFTNYNPSLKSRVTISVDKSKNQFSLELSSVAAAD |
| | | | TAVYYCAREYENFMDVWGKGTTVTVSSASTKGPSVFPLAPSSKS |
| | | | TSGGTAALGCLVKDYFPEPVTVSWNSGALTSGVHTFPAVLQSSG |
| | | | LYSLSSVVTVPSSSLGTQTYICNVNHKPSNTKVDKRVEPKSCDKT |
| | | | HTCPPCPAPELLGGPSVFLFPPKPKDTLMISRTPEVTCVVVDVSHE |
| | | | DPEVKFNWYVDGVEVHNAKTKPREEQYASTYRVVSVLTVLHQD |
| | | | WLNGKEYKCKVSNKALPAPIEKTISKAKGQPREPQVYTLPPSREE |
| | | | MTKNQVSLTCLVKGFYPSDIAVEWESNGQPENNYKTTPPVLDSD |
| | | | GSFFLYSKLTVDKSRWQQGNVFSCSVMHEALHNHYTQKSLSLSP |
| | | | G |
| 1434 | ATX-P-3382 | HC IgG1-Fc aa | QVQLQESGPGLVKPSGTLSLTCAVSGDSISSNSWWNWVRQPPGK |
| | | | GLEWIGQIFHSGHTNYNPSLKSRVTMSIDKSKNQFSLKLTSVTAA |
| | | | DTALYYCARGGEYENSANWFDPWGQGTLVTVSSASTKGPSVFPL |
| | | | APSSKSTSGGTAALGCLVKDYFPEPVTVSWNSGALTSGVHTFPAV |
| | | | LQSSGLYSLSSVVTVPSSSLGTQTYICNVNHKPSNTKVDKRVEPK |
| | | | SCDKTHTCPPCPAPELLGGPSVFLFPPKPKDTLMISRTPEVTCVVV |
| | | | DVSHEDPEVKFNWYVDGVEVHNAKTKPREEQYASTYRVVSVLT |
| | | | VLHQDWLNGKEYKCKVSNKALPAPIEKTISKAKGQPREPQVYTL |
| | | | PPSREEMTKNQVSLTCLVKGFYPSDIAVEWESNGQPENNYKTTPP |
| | | | VLDSDGSFFLYSKLTVDKSRWQQGNVFSCSVMHEALHNHYTQK |
| | | | SLSLSPG |
| 1435 | ATX-P-3383 | HC IgG1-Fc aa | QVQLQESGPGLVKPSGTLSLTCAVSGVSINKDNWWTWVRQPPG |
| | | | KGLEWIGKIYHSGSTNYNPSLKSRVTISVDNSKNQFSLKLNSVTA |
| | | | ADTAVYYCTRGGDIAMEGDWFAPWGQGTLVTVSSASTKGPSVF |
| | | | PLAPSSKSTSGGTAALGCLVKDYFPEPVTVSWNSGALTSGVHTFP |
| | | | AVLQSSGLYSLSSVVTVPSSSLGTQTYICNVNHKPSNTKVDKRVE |
| | | | PKSCDKTHTCPPCPAPELLGGPSVFLFPPKPKDTLMISRTPEVTCV |
| | | | VVDVSHEDPEVKFNWYVDGVEVHNAKTKPREEQYASTYRVVSV |
| | | | LTVLHQDWLNGKEYKCKVSNKALPAPIEKTISKAKGQPREPQVY |
| | | | TLPPSREEMTKNQVSLTCLVKGFYPSDIAVEWESNGQPENNYKTT |
| | | | PPVLDSDGSFFLYSKLTVDKSRWQQGNVFSCSVMHEALHNHYTQ |
| | | | KSLSLSPG |
| 1436 | ATX-P-3384 | HC IgG1-Fc aa | QVQLQESGPGLVKPSGTLSLTCAVSGGSISSDNWWNWVRQPPGK |
| | | | GLEWLGKIYHSGNTDYNPSLKSRVTISVDKSKNQFSLRLSSVTAA |
| | | | DTAVYYCARGGTETTGYMDVWGKGTTVTVSSASTKGPSVFPLA |
| | | | PSSKSTSGGTAALGCLVKDYFPEPVTVSWNSGALTSGVHTFPAVL |
| | | | QSSGLYSLSSVVTVPSSSLGTQTYICNVNHKPSNTKVDKRVEPKS |
| | | | CDKTHTCPPCPAPELLGGPSVFLFPPKPKDTLMISRTPEVTCVVVD |
| | | | VSHEDPEVKFNWYVDGVEVHNAKTKPREEQYASTYRVVSVLTV |
| | | | LHQDWLNGKEYKCKVSNKALPAPIEKTISKAKGQPREPQVYTLPP |
| | | | SREEMTKNQVSLTCLVKGFYPSDIAVEWESNGQPENNYKTTPPV |
| | | | LDSDGSFFLYSKLTVDKSRWQQGNVFSCSVMHEALHNHYTQKSL |
| | | | SLSPG |
| 1437 | ATX-P-3386 | HC IgG1-Fc aa | QVQLQESGPGLVKPSGTLSLTCAVSGGSISNDNWWSWVRQPPGK |
| | | | GLEWIGKIYHSGFTNYNPSLKSRVTISVDKSKNQFSLKLNSVTAA |
| | | | DTAVYYCARGGDNFMEGEGLGTWGPGTLVTVSSASTKGPSVFPL |
| | | | APSSKSTSGGTAALGCLVKDYFPEPVTVSWNSGALTSGVHTFPAV |
| | | | LQSSGLYSLSSVVTVPSSSLGTQTYICNVNHKPSNTKVDKRVEPK |
| | | | SCDKTHTCPPCPAPELLGGPSVFLFPPKPKDTLMISRTPEVTCVVV |
| | | | DVSHEDPEVKFNWYVDGVEVHNAKTKPREEQYASTYRVVSVLT |
| | | | VLHQDWLNGKEYKCKVSNKALPAPIEKTISKAKGQPREPQVYTL |
| | | | PPSREEMTKNQVSLTCLVKGFYPSDIAVEWESNGQPENNYKTTPP |
| | | | VLDSDGSFFLYSKLTVDKSRWQQGNVFSCSVMHEALHNHYTQK |
| | | | SLSLSPG |
| 1438 | ATX-P-3387 | HC IgG1-Fc aa | QVQLQESGPGLVKPSGTLSLTCAVSGGSISNDNWWNWVRQSPGK |
| | | | GLEWIGKIYHSGFTDYNPSLKSRVTISVDKSKNQFSLKLSSVTAAD |
| | | | TAVYYCARGNHNYLWIGYLGTWGPGTLVTVSSASTKGPSVFPLA |
| | | | PSSKSTSGGTAALGCLVKDYFPEPVTVSWNSGALTSGVHTFPAVL |
| | | | QSSGLYSLSSVVTVPSSSLGTQTYICNVNHKPSNTKVDKRVEPKS |
| | | | CDKTHTCPPCPAPELLGGPSVFLFPPKPKDTLMISRTPEVTCVVVD |
| | | | VSHEDPEVKFNWYVDGVEVHNAKTKPREEQYASTYRVVSVLTV |
| | | | LHQDWLNGKEYKCKVSNKALPAPIEKTISKAKGQPREPQVYTLPP |
| | | | SREEMTKNQVSLTCLVKGFYPSDIAVEWESNGQPENNYKTTPPV |
| | | | LDSDGSFFLYSKLTVDKSRWQQGNVFSCSVMHEALHNHYTQKSL |
| | | | SLSPG |
| 1439 | ATX-P-3389 | HC IgG1-Fc aa | QVQLQESGPGLVKPSGTLSLICAVSGGSISSSNWWSWVRQPPGKG |
| | | | LEWIGRIYHSGHTNYNPSLKSRVTISVDKSKNQFSLKLTSVTAAD |
| | | | TAVYYCARGRDLTGYFDYWGQGTLVTVSSASTKGPSVFPLAPSS |
| | | | KSTSGGTAALGCLVKDYFPEPVTVSWNSGALTSGVHTFPAVLQS |
| | | | SGLYSLSSVVTVPSSSLGTQTYICNVNHKPSNTKVDKRVEPKSCD |
| | | | KTHTCPPCPAPELLGGPSVFLFPPKPKDTLMISRTPEVTCVVVDVS |
| | | | HEDPEVKFNWYVDGVEVHNAKTKPREEQYASTYRVVSVLTVLH |
| | | | QDWLNGKEYKCKVSNKALPAPIEKTISKAKGQPREPQVYTLPPSR |
| | | | EEMTKNQVSLTCLVKGFYPSDIAVEWESNGQPENNYKTTPPVLD |
| | | | SDGSFFLYSKLTVDKSRWQQGNVFSCSVMHEALHNHYTQKSLSL |
| | | | SPG |
| 1440 | ATX-P-3391 | HC IgG1-Fc aa | QVQLQESGPGLVKPSGTLSLTCAVSGGSISNDNWWSWVRQSPGK |
| | | | GLEWIGKIYHSEFTNYNPSLKSRVTISVDKSKNQFSLELSSVTAAD |
| | | | TAVYYCARGVDFWSGSHMDVWGKGTTVTVSSASTKGPSVFPLA |
| | | | PSSKSTSGGTAALGCLVKDYFPEPVTVSWNSGALTSGVHTFPAVL |
| | | | QSSGLYSLSSVVTVPSSSLGTQTYICNVNHKPSNTKVDKRVEPKS |
| | | | CDKTHTCPPCPAPELLGGPSVFLFPPKPKDTLMISRTPEVTCVVVD |
| | | | VSHEDPEVKFNWYVDGVEVHNAKTKPREEQYASTYRVVSVLTV |
| | | | LHQDWLNGKEYKCKVSNKALPAPIEKTISKAKGQPREPQVYTLPP |
| | | | SREEMTKNQVSLTCLVKGFYPSDIAVEWESNGQPENNYKTTPPV |
| | | | LDSDGSFFLYSKLTVDKSRWQQGNVFSCSVMHEALHNHYTQKSL |
| | | | SLSPG |
| 1441 | ATX-P-3392 | HC IgG1-Fc aa | QVQLQESGPGLVKPSGTLSLTCAVSGGSISNDNWWSWVRQSPGK |
| | | | GLEWIGKIYHSEFTNYNPSLKSRVTISVDKSKNQFSLELSSVTAAD |
| | | | TAVYFCAREGLELPHMDVWGKGTTVTVSSASTKGPSVFPLAPSS |
| | | | KSTSGGTAALGCLVKDYFPEPVTVSWNSGALTSGVHTFPAVLQS |
| | | | SGLYSLSSVVTVPSSSLGTQTYICNVNHKPSNTKVDKRVEPKSCD |
| | | | KTHTCPPCPAPELLGGPSVFLFPPKPKDTLMISRTPEVTCVVVDVS |
| | | | HEDPEVKFNWYVDGVEVHNAKTKPREEQYASTYRVVSVLTVLH |
| | | | QDWLNGKEYKCKVSNKALPAPIEKTISKAKGQPREPQVYTLPPSR |
| | | | EEMTKNQVSLTCLVKGFYPSDIAVEWESNGQPENNYKTTPPVLD |
| | | | SDGSFFLYSKLTVDKSRWQQGNVFSCSVMHEALHNHYTQKSLSL |
| | | | SPG |
| 1442 | ATX-P-3395 | HC IgG1-Fc aa | EVQLVESGGGVVKPGGSLRLSCAASGFTFSSYWMHWVRQAPGK |
| | | | GLVWVSRINSDGSSTSYADSVQGRFTISRDIAKNTLYLQMNSLRA |
| | | | EDTAVYYCARGQHLVQDYWGQGTLVTVSSASTKGPSVFPLAPSS |
| | | | KSTSGGTAALGCLVKDYFPEPVTVSWNSGALTSGVHTFPAVLQS |
| | | | SGLYSLSSVVTVPSSSLGTQTYICNVNHKPSNTKVDKRVEPKSCD |
| | | | KTHTCPPCPAPELLGGPSVFLFPPKPKDTLMISRTPEVTCVVVDVS |
| | | | HEDPEVKFNWYVDGVEVHNAKTKPREEQYASTYRVVSVLTVLH |
| | | | QDWLNGKEYKCKVSNKALPAPIEKTISKAKGQPREPQVYTLPPSR |
| | | | EEMTKNQVSLTCLVKGFYPSDIAVEWESNGQPENNYKTTPPVLD |
| | | | SDGSFFLYSKLTVDKSRWQQGNVFSCSVMHEALHNHYTQKSLSL |
| | | | SPG |
| 1443 | ATX-P-3396 | HC IgG1-Fc aa | QVQLVQSGAEVKNPGASVKVSCKASGYTFTGYYMHWVRQAPG |
| | | | QGLEWMGWINPNSGGTNYAQKFQGRVTMTRDTSISTAYMELSR |
| | | | LRSDDTAVYYCARERGDYDGDAFDIWGQGTMVTVSSASTKGPS |
| | | | VFPLAPSSKSTSGGTAALGCLVKDYFPEPVTVSWNSGALTSGVHT |
| | | | FPAVLQSSGLYSLSSVVTVPSSSLGTQTYICNVNHKPSNTKVDKR |
| | | | VEPKSCDKTHTCPPCPAPELLGGPSVFLFPPKPKDTLMISRTPEVT |
| | | | CVVVDVSHEDPEVKFNWYVDGVEVHNAKTKPREEQYASTYRVV |
| | | | SVLTVLHQDWLNGKEYKCKVSNKALPAPIEKTISKAKGQPREPQ |
| | | | VYTLPPSREEMTKNQVSLTCLVKGFYPSDIAVEWESNGQPENNY |
| | | | KTTPPVLDSDGSFFLYSKLTVDKSRWQQGNVFSCSVMHEALHNH |
| | | | YTQKSLSLSPG |
| 1444 | ATX-P-3397 | HC IgG1-Fc aa | EVQLVESGGGLVQPGGSLRLSCAASGFTFSNYYMNWVRQAPGK |
| | | | GLEWVANIKQDGSEKYYVDSVKGRFTISRDNAKNSLYLQMNSLR |
| | | | AEDTAVYYCARDGYYNFDAFDIWGQGTMVTVSSASTKGPSVFPL |
| | | | APSSKSTSGGTAALGCLVKDYFPEPVTVSWNSGALTSGVHTFPAV |
| | | | LQSSGLYSLSSVVTVPSSSLGTQTYICNVNHKPSNTKVDKRVEPK |
| | | | SCDKTHTCPPCPAPELLGGPSVFLFPPKPKDTLMISRTPEVTCVVV |
| | | | DVSHEDPEVKFNWYVDGVEVHNAKTKPREEQYASTYRVVSVLT |
| | | | VLHQDWLNGKEYKCKVSNKALPAPIEKTISKAKGQPREPQVYTL |
| | | | PPSREEMTKNQVSLTCLVKGFYPSDIAVEWESNGQPENNYKTTPP |
| | | | VLDSDGSFFLYSKLTVDKSRWQQGNVFSCSVMHEALHNHYTQK |
| | | | SLSLSPG |
| 1445 | ATX-P-3405 | HC IgG1-Fc aa | EVQLVESGGGLVQPGGSLRLSCAASGFTFSSYSMNWVRQAPGKG |
| | | | LEWVSSISSSSSYIYYADSVKGRFTISRDNAKNSLYLQMNSLRAED |
| | | | TAVYYCAREGYDNWNSACDIWGQGTMVTVSSASTKGPSVFPLA |
| | | | PSSKSTSGGTAALGCLVKDYFPEPVTVSWNSGALTSGVHTFPAVL |
| | | | QSSGLYSLSSVVTVPSSSLGTQTYICNVNHKPSNTKVDKRVEPKS |
| | | | CDKTHTCPPCPAPELLGGPSVFLFPPKPKDTLMISRTPEVTCVVVD |
| | | | VSHEDPEVKFNWYVDGVEVHNAKTKPREEQYASTYRVVSVLTV |
| | | | LHQDWLNGKEYKCKVSNKALPAPIEKTISKAKGQPREPQVYTLPP |
| | | | SREEMTKNQVSLTCLVKGFYPSDIAVEWESNGQPENNYKTTPPV |
| | | | LDSDGSFFLYSKLTVDKSRWQQGNVFSCSVMHEALHNHYTQKSL |
| | | | SLSPG |
| 1446 | ATX-P-3406 | HC IgG1-Fc aa | QITLKESGPTLVKPTQTLTLTCTFSGFSLSTSGVGVGWIRQPPGKA |
| | | | LEWLALIYWNGDERYSPSLKSRLTITKDTSKNQVVLTMTNMDPV |
| | | | DTATYYCAHSPNWGYEAFDIWGQGTMVTVSSASTKGPSVFPLAP |
| | | | SSKSTSGGTAALGCLVKDYFPEPVTVSWNSGALTSGVHTFPAVL |
| | | | QSSGLYSLSSVVTVPSSSLGTQTYICNVNHKPSNTKVDKRVEPKS |
| | | | CDKTHTCPPCPAPELLGGPSVFLFPPKPKDTLMISRTPEVTCVVVD |
| | | | VSHEDPEVKFNWYVDGVEVHNAKTKPREEQYASTYRVVSVLTV |
| | | | LHQDWLNGKEYKCKVSNKALPAPIEKTISKAKGQPREPQVYTLPP |
| | | | SREEMTKNQVSLTCLVKGFYPSDIAVEWESNGQPENNYKTTPPV |
| | | | LDSDGSFFLYSKLTVDKSRWQQGNVFSCSVMHEALHNHYTQKSL |
| | | | SLSPG |
| 1447 | ATX-P-3407 | HC IgG1-Fc aa | EVQLVESGGGLVPPGGSLRLSCAASGFTFSSYCMNWVRQAPGKG |
| | | | LEWVSSINSDSSYIYYADSVKGRFTISRDNAKNSLYLQMNSLRAE |
| | | | DTAVYYCAREGYYNWNGGNDYWGQGTLVTVSSASTKGPSVFPL |
| | | | APSSKSTSGGTAALGCLVKDYFPEPVTVSWNSGALTSGVHTFPAV |
| | | | LQSSGLYSLSSVVTVPSSSLGTQTYICNVNHKPSNTKVDKRVEPK |
| | | | SCDKTHTCPPCPAPELLGGPSVFLFPPKPKDTLMISRTPEVTCVVV |
| | | | DVSHEDPEVKFNWYVDGVEVHNAKTKPREEQYASTYRVVSVLT |
| | | | VLHQDWLNGKEYKCKVSNKALPAPIEKTISKAKGQPREPQVYTL |
| | | | PPSREEMTKNQVSLTCLVKGFYPSDIAVEWESNGQPENNYKTTPP |
| | | | VLDSDGSFFLYSKLTVDKSRWQQGNVFSCSVMHEALHNHYTQK |
| | | | SLSLSPG |
| 1448 | ATX-P-3408 | HC IgG1-Fc aa | EVQLVESGGGLVQPGGSLRLSCAASGFTFSSYWMHWVRQAPGK |
| | | | GLVWVSHINSDGSSTNYADSVKGRFTISRDNAKNTLYLQMNSLR |
| | | | SEDTAVYYCAREGYWNGDTFDIWGQGTMVTVSSASTKGPSVFPL |
| | | | APSSKSTSGGTAALGCLVKDYFPEPVTVSWNSGALTSGVHTFPAV |
| | | | LQSSGLYSLSSVVTVPSSSLGTQTYICNVNHKPSNTKVDKRVEPK |
| | | | SCDKTHTCPPCPAPELLGGPSVFLFPPKPKDTLMISRTPEVTCVVV |
| | | | DVSHEDPEVKFNWYVDGVEVHNAKTKPREEQYASTYRVVSVLT |
| | | | VLHQDWLNGKEYKCKVSNKALPAPIEKTISKAKGQPREPQVYTL |
| | | | PPSREEMTKNQVSLTCLVKGFYPSDIAVEWESNGQPENNYKTTPP |
| | | | VLDSDGSFFLYSKLTVDKSRWQQGNVFSCSVMHEALHNHYTQK |
| | | | SLSLSPG |
| 1449 | ATX-P-3410 | HC IgG1-Fc aa | EVQLVESGGGLVQPGGSLRLSCAASGFTFSAYDMHWVRQTPGK |
| | | | GLEWVSTIGTAGDTYYPDSVKGRFTISRDFARRSLYLHMNNLRA |
| | | | GDTAVYYCARGGSSSWYDWYFDLWGRGTLVTVSSASTKGPSVF |
| | | | PLAPSSKSTSGGTAALGCLVKDYFPEPVTVSWNSGALTSGVHTFP |
| | | | AVLQSSGLYSLSSVVTVPSSSLGTQTYICNVNHKPSNTKVDKRVE |
| | | | PKSCDKTHTCPPCPAPELLGGPSVFLFPPKPKDTLMISRTPEVTCV |
| | | | VVDVSHEDPEVKFNWYVDGVEVHNAKTKPREEQYASTYRVVSV |
| | | | LTVLHQDWLNGKEYKCKVSNKALPAPIEKTISKAKGQPREPQVY |
| | | | TLPPSREEMTKNQVSLTCLVKGFYPSDIAVEWESNGQPENNYKTT |
| | | | PPVLDSDGSFFLYSKLTVDKSRWQQGNVFSCSVMHEALHNHYTQ |
| | | | KSLSLSPG |
| 1450 | ATX-P-3412 | HC IgG1-Fc aa | QVQLQESGPGLVKPSGTLSLTCAVSGGSISSSTWWSWVRQPPGK |
| | | | GLEWIGEIYHSGSTNYNPSLKSRVTISLDKSKNQFSLKLSSVTAAD |
| | | | TAVYYCAISLYNWNDAAFDIWGQGTMVTVSSASTKGPSVFPLAP |
| | | | SSKSTSGGTAALGCLVKDYFPEPVTVSWNSGALTSGVHTFPAVL |
| | | | QSSGLYSLSSVVTVPSSSLGTQTYICNVNHKPSNTKVDKRVEPKS |
| | | | CDKTHTCPPCPAPELLGGPSVFLFPPKPKDTLMISRTPEVTCVVVD |
| | | | VSHEDPEVKFNWYVDGVEVHNAKTKPREEQYASTYRVVSVLTV |
| | | | LHQDWLNGKEYKCKVSNKALPAPIEKTISKAKGQPREPQVYTLPP |
| | | | SREEMTKNQVSLTCLVKGFYPSDIAVEWESNGQPENNYKTTPPV |
| | | | LDSDGSFFLYSKLTVDKSRWQQGNVFSCSVMHEALHNHYTQKSL |
| | | | SLSPG |
| 1451 | ATX-P-3413 | HC IgG1-Fc aa | QVQLVQSGSEVKKPGASVKVSCKTSGYTFTGYYMHWVRQAPGQ |
| | | | GLEWMGWINPNSGGTTYAQKFQGRVTMTRDTSISTAYMELNRL |
| | | | RSDDTAVYYCAREAGGSGEYFQHWGQGTPVTVSSASTKGPSVFP |
| | | | LAPSSKSTSGGTAALGCLVKDYFPEPVTVSWNSGALTSGVHTFPA |
| | | | VLQSSGLYSLSSVVTVPSSSLGTQTYICNVNHKPSNTKVDKRVEP |
| | | | KSCDKTHTCPPCPAPELLGGPSVFLFPPKPKDTLMISRTPEVTCVV |
| | | | VDVSHEDPEVKFNWYVDGVEVHNAKTKPREEQYASTYRVVSVL |
| | | | TVLHQDWLNGKEYKCKVSNKALPAPIEKTISKAKGQPREPQVYT |
| | | | LPPSREEMTKNQVSLTCLVKGFYPSDIAVEWESNGQPENNYKTTP |
| | | | PVLDSDGSFFLYSKLTVDKSRWQQGNVFSCSVMHEALHNHYTQ |
| | | | KSLSLSPG |
| 1452 | ATX-P-3414 | HC IgG1-Fc aa | QITLKESGPTLVKPTQTLTLTCTFSGFSLSTSGVGVGWIRQPPGKA |
| | | | LEWLALIYWNDVKFYSPSLQSRLTITKDTSKNQVVLTLTNMDPV |
| | | | DTATYYCAHGDNWNYRAFDIWGQGTMVTVSSASTKGPSVFPLA |
| | | | PSSKSTSGGTAALGCLVKDYFPEPVTVSWNSGALTSGVHTFPAVL |
| | | | QSSGLYSLSSVVTVPSSSLGTQTYICNVNHKPSNTKVDKRVEPKS |
| | | | CDKTHTCPPCPAPELLGGPSVFLFPPKPKDTLMISRTPEVTCVVVD |
| | | | VSHEDPEVKFNWYVDGVEVHNAKTKPREEQYASTYRVVSVLTV |
| | | | LHQDWLNGKEYKCKVSNKALPAPIEKTISKAKGQPREPQVYTLPP |
| | | | SREEMTKNQVSLTCLVKGFYPSDIAVEWESNGQPENNYKTTPPV |
| | | | LDSDGSFFLYSKLTVDKSRWQQGNVFSCSVMHEALHNHYTQKSL |
| | | | SLSPG |
| 1453 | ATX-P-3419 | HC IgG1-Fc aa | QVQLVQSGAEVKKPGASVKVSCKASGYTFTSYGISWVRQAPGQ |
| | | | GLEWMGWISAYNGNTHYAQNLQGRVTMTTDTSTSTAYMELRSL |
| | | | RSDDTAVYYCARSIAALDFWGQGTPVTVSSASTKGPSVFPLAPSS |
| | | | KSTSGGTAALGCLVKDYFPEPVTVSWNSGALTSGVHTFPAVLQS |
| | | | SGLYSLSSVVTVPSSSLGTQTYICNVNHKPSNTKVDKRVEPKSCD |
| | | | KTHTCPPCPAPELLGGPSVFLFPPKPKDTLMISRTPEVTCVVVDVS |
| | | | HEDPEVKFNWYVDGVEVHNAKTKPREEQYASTYRVVSVLTVLH |
| | | | QDWLNGKEYKCKVSNKALPAPIEKTISKAKGQPREPQVYTLPPSR |
| | | | EEMTKNQVSLTCLVKGFYPSDIAVEWESNGQPENNYKTTPPVLD |
| | | | SDGSFFLYSKLTVDKSRWQQGNVFSCSVMHEALHNHYTQKSLSL |
| | | | SPG |
| 1454 | ATX-P-3421 | HC IgG1-Fc aa | QVQLQESGPGLVKPSGTLSLTCAVSGGSISSNNWWSWVRQPPGK |
| | | | GLEWIGQIYHSENTNYNPSLKSRVTISVDKSKNQFSLKLSSVTAA |
| | | | DTAIYYCARVDDWNYGGHFDYWGQGTLVTVSSASTKGPSVFPL |
| | | | APSSKSTSGGTAALGCLVKDYFPEPVTVSWNSGALTSGVHTFPAV |
| | | | LQSSGLYSLSSVVTVPSSSLGTQTYICNVNHKPSNTKVDKRVEPK |
| | | | SCDKTHTCPPCPAPELLGGPSVFLFPPKPKDTLMISRTPEVTCVVV |
| | | | DVSHEDPEVKFNWYVDGVEVHNAKTKPREEQYASTYRVVSVLT |
| | | | VLHQDWLNGKEYKCKVSNKALPAPIEKTISKAKGQPREPQVYTL |
| | | | PPSREEMTKNQVSLTCLVKGFYPSDIAVEWESNGQPENNYKTTPP |
| | | | VLDSDGSFFLYSKLTVDKSRWQQGNVFSCSVMHEALHNHYTQK |
| | | | SLSLSPG |
| 1455 | ATX-P-3428 | HC IgG1-Fc aa | QVQLVQSGAEVKKPGASVKVSCKASGYTFTGYGISWVRQAPGQ |
| | | | GLEWMGWISAYNGNTHYAQNLQGRVTMTTDTSINTAYMELRS |
| | | | LISDDTAFYYCARAGLGIDYWGQGTLVTVSSASTKGPSVFPLAPS |
| | | | SKSTSGGTAALGCLVKDYFPEPVTVSWNSGALTSGVHTFPAVLQ |
| | | | SSGLYSLSSVVTVPSSSLGTQTYICNVNHKPSNTKVDKRVEPKSC |
| | | | DKTHTCPPCPAPELLGGPSVFLFPPKPKDTLMISRTPEVTCVVVDV |
| | | | SHEDPEVKFNWYVDGVEVHNAKTKPREEQYASTYRVVSVLTVL |
| | | | HQDWLNGKEYKCKVSNKALPAPIEKTISKAKGQPREPQVYTLPPS |
| | | | REEMTKNQVSLTCLVKGFYPSDIAVEWESNGQPENNYKTTPPVL |
| | | | DSDGSFFLYSKLTVDKSRWQQGNVFSCSVMHEALHNHYTQKSLS |
| | | | LSPG |
| 1456 | ATX-P-3430 | HC IgG1-Fc aa | QVQLQESGPGLVKPSGTLSLTCAVSGGSISSSDWWSWVRQSPGK |
| | | | GLEWIGEIYHSGSTNYNPSLKSRVSISVDKSKNQFSLKLSSVTAAD |
| | | | TAVYYCARGGHIGYYYMDVWGKGTTVTVSSASTKGPSVFPLAPS |
| | | | SKSTSGGTAALGCLVKDYFPEPVTVSWNSGALTSGVHTFPAVLQ |
| | | | SSGLYSLSSVVTVPSSSLGTQTYICNVNHKPSNTKVDKRVEPKSC |
| | | | DKTHTCPPCPAPELLGGPSVFLFPPKPKDTLMISRTPEVTCVVVDV |
| | | | SHEDPEVKFNWYVDGVEVHNAKTKPREEQYASTYRVVSVLTVL |
| | | | HQDWLNGKEYKCKVSNKALPAPIEKTISKAKGQPREPQVYTLPPS |
| | | | REEMTKNQVSLTCLVKGFYPSDIAVEWESNGQPENNYKTTPPVL |
| | | | DSDGSFFLYSKLTVDKSRWQQGNVFSCSVMHEALHNHYTQKSLS |
| | | | LSPG |
| 1457 | ATX-P-3431 | HC IgG1-Fc aa | EVQLVQSGAEVKKPGESLKISCKGSGYSFTNYWIGWVRQMPGKG |
| | | | LEWMGIYPGDSDTIYSPSFQGQVTFSADKSINTAYLQWSSLKASD |
| | | | TAMYYCARGRGYSGYEGAFDIWGQGTMVTVSSASTKGPSVFPL |
| | | | APSSKSTSGGTAALGCLVKDYFPEPVTVSWNSGALTSGVHTFPAV |
| | | | LQSSGLYSLSSVVTVPSSSLGTQTYICNVNHKPSNTKVDKRVEPK |
| | | | SCDKTHTCPPCPAPELLGGPSVFLFPPKPKDTLMISRTPEVTCVVV |
| | | | DVSHEDPEVKFNWYVDGVEVHNAKTKPREEQYASTYRVVSVLT |
| | | | VLHQDWLNGKEYKCKVSNKALPAPIEKTISKAKGQPREPQVYTL |
| | | | PPSREEMTKNQVSLTCLVKGFYPSDIAVEWESNGQPENNYKTTPP |
| | | | VLDSDGSFFLYSKLTVDKSRWQQGNVFSCSVMHEALHNHYTQK |
| | | | SLSLSPG |
| 1458 | ATX-P-3435 | HC IgG1-Fc aa | QVQLVQSGAEVKKPGASVKVSCKASGYTFTNYGISWVRQAPGQ |
| | | | GLEWMGWISAYNGNTHYAQKLQGRVTMTTDTSTSTAYMELRSL |
| | | | RSDDTAVYYCARAAAAVDYWGQGTLVTVSSASTKGPSVFPLAPS |
| | | | SKSTSGGTAALGCLVKDYFPEPVTVSWNSGALTSGVHTFPAVLQ |
| | | | SSGLYSLSSVVTVPSSSLGTQTYICNVNHKPSNTKVDKRVEPKSC |
| | | | DKTHTCPPCPAPELLGGPSVFLFPPKPKDTLMISRTPEVTCVVVDV |
| | | | SHEDPEVKFNWYVDGVEVHNAKTKPREEQYASTYRVVSVLTVL |
| | | | HQDWLNGKEYKCKVSNKALPAPIEKTISKAKGQPREPQVYTLPPS |
| | | | REEMTKNQVSLTCLVKGFYPSDIAVEWESNGQPENNYKTTPPVL |
| | | | DSDGSFFLYSKLTVDKSRWQQGNVFSCSVMHEALHNHYTQKSLS |
| | | | LSPG |
| 1459 | ATX-P-3436 | HC IgG1-Fc aa | QVQLQESGPGLVKPSETLSLSCTVSGGSVSSGSYYWSWIRQPPGK |
| | | | GLEWIGYIYYSGSTKYNPSLKSRVTISVDTSKNQVSLKLSSVTAA |
| | | | DTAVYYCARDKGHWNYGAFDIWGQGTMVTVSSASTKGPSVFPL |
| | | | APSSKSTSGGTAALGCLVKDYFPEPVTVSWNSGALTSGVHTFPAV |
| | | | LQSSGLYSLSSVVTVPSSSLGTQTYICNVNHKPSNTKVDKRVEPK |
| | | | SCDKTHTCPPCPAPELLGGPSVFLFPPKPKDTLMISRTPEVTCVVV |
| | | | DVSHEDPEVKFNWYVDGVEVHNAKTKPREEQYASTYRVVSVLT |
| | | | VLHQDWLNGKEYKCKVSNKALPAPIEKTISKAKGQPREPQVYTL |
| | | | PPSREEMTKNQVSLTCLVKGFYPSDIAVEWESNGQPENNYKTTPP |
| | | | VLDSDGSFFLYSKLTVDKSRWQQGNVFSCSVMHEALHNHYTQK |
| | | | SLSLSPG |
| 1460 | ATX-P-3437 | HC IgG1-Fc aa | QVQLQESGPGLVKPSGTLSLTCAVSGGSISSNNWWSWVRQPPGK |
| | | | GLEWIGEIYHSGNINYNPSLKSRVTISVDKSKNQFSLKLSSVTAAD |
| | | | TAVYYCARGGEYGDPVGYFDLWGRGTLVTVSSASTKGPSVFPLA |
| | | | PSSKSTSGGTAALGCLVKDYFPEPVTVSWNSGALTSGVHTFPAVL |
| | | | QSSGLYSLSSVVTVPSSSLGTQTYICNVNHKPSNTKVDKRVEPKS |
| | | | CDKTHTCPPCPAPELLGGPSVFLFPPKPKDTLMISRTPEVTCVVVD |
| | | | VSHEDPEVKFNWYVDGVEVHNAKTKPREEQYASTYRVVSVLTV |
| | | | LHQDWLNGKEYKCKVSNKALPAPIEKTISKAKGQPREPQVYTLPP |
| | | | SREEMTKNQVSLTCLVKGFYPSDIAVEWESNGQPENNYKTTPPV |
| | | | LDSDGSFFLYSKLTVDKSRWQQGNVFSCSVMHEALHNHYTQKSL |
| | | | SLSPG |
| 1461 | ATX-P-3440 | HC IgG1-Fc aa | QVQLVQSGAEVKKPGASVKVSCKASGYTFTTYGISWVRQAPGQ |
| | | | GLEWMGWISAYSGNTNYAQKLQGRVTMTTDTSTSTAYMELRSL |
| | | | RSDDTAVYYCARERVSNWVFDFWGQGTLVTVSSASTKGPSVFPL |
| | | | APSSKSTSGGTAALGCLVKDYFPEPVTVSWNSGALTSGVHTFPAV |
| | | | LQSSGLYSLSSVVTVPSSSLGTQTYICNVNHKPSNTKVDKRVEPK |
| | | | SCDKTHTCPPCPAPELLGGPSVFLFPPKPKDTLMISRTPEVTCVVV |
| | | | DVSHEDPEVKFNWYVDGVEVHNAKTKPREEQYASTYRVVSVLT |
| | | | VLHQDWLNGKEYKCKVSNKALPAPIEKTISKAKGQPREPQVYTL |
| | | | PPSREEMTKNQVSLTCLVKGFYPSDIAVEWESNGQPENNYKTTPP |
| | | | VLDSDGSFFLYSKLTVDKSRWQQGNVFSCSVMHEALHNHYTQK |
| | | | SLSLSPG |
| 1462 | ATX-P-3442 | HC IgG1-Fc aa | QVQLQESGPGLVKPSGTLSLTCAVSGGSISSSDWWSWVRQPPGK |
| | | | GLEWIGEIYHSRNTNYNPSLKSRVTISVDKSKNQFSLKLSSVTAAD |
| | | | TAVYYCASGGVVADYYMDVWGKGTTVTVSSASTKGPSVFPLAP |
| | | | SSKSTSGGTAALGCLVKDYFPEPVTVSWNSGALTSGVHTFPAVL |
| | | | QSSGLYSLSSVVTVPSSSLGTQTYICNVNHKPSNTKVDKRVEPKS |
| | | | CDKTHTCPPCPAPELLGGPSVFLFPPKPKDTLMISRTPEVTCVVVD |
| | | | VSHEDPEVKFNWYVDGVEVHNAKTKPREEQYASTYRVVSVLTV |
| | | | LHQDWLNGKEYKCKVSNKALPAPIEKTISKAKGQPREPQVYTLPP |
| | | | SREEMTKNQVSLTCLVKGFYPSDIAVEWESNGQPENNYKTTPPV |
| | | | LDSDGSFFLYSKLTVDKSRWQQGNVFSCSVMHEALHNHYTQKSL |
| | | | SLSPG |
| 1463 | ATX-P-3444 | HC IgG1-Fc aa | EVQLVESGGGLVKPGGSLRLSCAASGFTFSSYGMNWVRQAPGK |
| | | | GLEWVSSISGYGSYIYYAASVKGRFTISRDSAKNSLYLQMNSLSA |
| | | | EDTAVYYCARELGGIYYGVGYFDLWGRGTLVTVSSASTKGPSVF |
| | | | PLAPSSKSTSGGTAALGCLVKDYFPEPVTVSWNSGALTSGVHTFP |
| | | | AVLQSSGLYSLSSVVTVPSSSLGTQTYICNVNHKPSNTKVDKRVE |
| | | | PKSCDKTHTCPPCPAPELLGGPSVFLFPPKPKDTLMISRTPEVTCV |
| | | | VVDVSHEDPEVKFNWYVDGVEVHNAKTKPREEQYASTYRVVSV |
| | | | LTVLHQDWLNGKEYKCKVSNKALPAPIEKTISKAKGQPREPQVY |
| | | | TLPPSREEMTKNQVSLTCLVKGFYPSDIAVEWESNGQPENNYKTT |
| | | | PPVLDSDGSFFLYSKLTVDKSRWQQGNVFSCSVMHEALHNHYTQ |
| | | | KSLSLSPG |
| 1464 | ATX-P-3447 | HC IgG1-Fc aa | QVQLQESGPGLVKPSETLSLTCAVSGGSVSSGNYYWSWIRQPPG |
| | | | KGLEWIGYIYSSGSTNYNPSLKSRVTISIDTSKNQFSLKLSSVTAA |
| | | | DTAVYYCARSPRGYSYGPFAYWGQGTLVTVSSASTKGPSVFPLA |
| | | | PSSKSTSGGTAALGCLVKDYFPEPVTVSWNSGALTSGVHTFPAVL |
| | | | QSSGLYSLSSVVTVPSSSLGTQTYICNVNHKPSNTKVDKRVEPKS |
| | | | CDKTHTCPPCPAPELLGGPSVFLFPPKPKDTLMISRTPEVTCVVVD |
| | | | VSHEDPEVKFNWYVDGVEVHNAKTKPREEQYASTYRVVSVLTV |
| | | | LHQDWLNGKEYKCKVSNKALPAPIEKTISKAKGQPREPQVYTLPP |
| | | | SREEMTKNQVSLTCLVKGFYPSDIAVEWESNGQPENNYKTTPPV |
| | | | LDSDGSFFLYSKLTVDKSRWQQGNVFSCSVMHEALHNHYTQKSL |
| | | | SLSPG |
| 1465 | ATX-P-3448 | HC IgG1-Fc aa | QVQLQESGPGLVKPSQTLSLTCTVSGGSISSGGYNWNWIRQHPGK |
| | | | GLEWIGYINYSGNTYYNPSLKSRVTISVDTSKNQFSLKLSSVTAA |
| | | | DTAVYYCARGPLDTAMAPFDYWGQGTLVTVSSASTKGPSVFPLA |
| | | | PSSKSTSGGTAALGCLVKDYFPEPVTVSWNSGALTSGVHTFPAVL |
| | | | QSSGLYSLSSVVTVPSSSLGTQTYICNVNHKPSNTKVDKRVEPKS |
| | | | CDKTHTCPPCPAPELLGGPSVFLFPPKPKDTLMISRTPEVTCVVVD |
| | | | VSHEDPEVKFNWYVDGVEVHNAKTKPREEQYASTYRVVSVLTV |
| | | | LHQDWLNGKEYKCKVSNKALPAPIEKTISKAKGQPREPQVYTLPP |
| | | | SREEMTKNQVSLTCLVKGFYPSDIAVEWESNGQPENNYKTTPPV |
| | | | LDSDGSFFLYSKLTVDKSRWQQGNVFSCSVMHEALHNHYTQKSL |
| | | | SLSPG |
| 1466 | ATX-P-3449 | HC IgG1-Fc aa | QVQLQESGPGLVKPSETLSLTCTVSGDSISSYYWSWIRQPPGKGL |
| | | | EWIGYIYYSGFTKYNPSLKSRVTISVDTSKNQFSLRLSSVTAADTA |
| | | | VYYCASVDSKWNYGSFHIWGQGTMVTVSSASTKGPSVFPLAPSS |
| | | | KSTSGGTAALGCLVKDYFPEPVTVSWNSGALTSGVHTFPAVLQS |
| | | | SGLYSLSSVVTVPSSSLGTQTYICNVNHKPSNTKVDKRVEPKSCD |
| | | | KTHTCPPCPAPELLGGPSVFLFPPKPKDTLMISRTPEVTCVVVDVS |
| | | | HEDPEVKFNWYVDGVEVHNAKTKPREEQYASTYRVVSVLTVLH |
| | | | QDWLNGKEYKCKVSNKALPAPIEKTISKAKGQPREPQVYTLPPSR |
| | | | EEMTKNQVSLTCLVKGFYPSDIAVEWESNGQPENNYKTTPPVLD |
| | | | SDGSFFLYSKLTVDKSRWQQGNVFSCSVMHEALHNHYTQKSLSL |
| | | | SPG |
| 1467 | ATX-P-3450 | HC IgG1-Fc aa | QVQLQESGPGLVKPSETLSLTCSVSGDSVSNNRYYWSWIRQPPGK |
| | | | GLEWIGYIYYSGSTNYNPSLKSRVTISVDTSKNQLSLNLSSVTAAD |
| | | | TAVYYCARDRPSRYKWNYDAFAIWGQGTMVTVSSASTKGPSVF |
| | | | PLAPSSKSTSGGTAALGCLVKDYFPEPVTVSWNSGALTSGVHTFP |
| | | | AVLQSSGLYSLSSVVTVPSSSLGTQTYICNVNHKPSNTKVDKRVE |
| | | | PKSCDKTHTCPPCPAPELLGGPSVFLFPPKPKDTLMISRTPEVTCV |
| | | | VVDVSHEDPEVKFNWYVDGVEVHNAKTKPREEQYASTYRVVSV |
| | | | LTVLHQDWLNGKEYKCKVSNKALPAPIEKTISKAKGQPREPQVY |
| | | | TLPPSREEMTKNQVSLTCLVKGFYPSDIAVEWESNGQPENNYKTT |
| | | | PPVLDSDGSFFLYSKLTVDKSRWQQGNVFSCSVMHEALHNHYTQ |
| | | | KSLSLSPG |
| 1468 | ATX-P-3451 | HC IgG1-Fc aa | QVQLQQWGAGLLKPSETLSLTCAVYGGSFSDYYWTWIRQPPGK |
| | | | GLEWIGEVNHIGSTNYNPSLKSRVTISVDTSKNQFSLNLSSVTAAD |
| | | | TAVYYCAKYSTSWYGWFDPWGQGTLVTVSSASTKGPSVFPLAPS |
| | | | SKSTSGGTAALGCLVKDYFPEPVTVSWNSGALTSGVHTFPAVLQ |
| | | | SSGLYSLSSVVTVPSSSLGTQTYICNVNHKPSNTKVDKRVEPKSC |
| | | | DKTHTCPPCPAPELLGGPSVFLFPPKPKDTLMISRTPEVTCVVVDV |
| | | | SHEDPEVKFNWYVDGVEVHNAKTKPREEQYASTYRVVSVLTVL |
| | | | HQDWLNGKEYKCKVSNKALPAPIEKTISKAKGQPREPQVYTLPPS |
| | | | REEMTKNQVSLTCLVKGFYPSDIAVEWESNGQPENNYKTTPPVL |
| | | | DSDGSFFLYSKLTVDKSRWQQGNVFSCSVMHEALHNHYTQKSLS |
| | | | LSPG |
| 1469 | ATX-P-3453 | HC IgG1-Fc aa | QVQLQESGPGLVKPSGTLSLTCAVSGDSISSNNWWSWFRQPPGK |
| | | | GLEWIGRIYHSGTTNYNPSLESRVTISVDNSRNQFSLKLSSVTAAD |
| | | | TAVYYCARGEEWELRGGVFDIWGQGTMVTVSSASTKGPSVFPLA |
| | | | PSSKSTSGGTAALGCLVKDYFPEPVTVSWNSGALTSGVHTFPAVL |
| | | | QSSGLYSLSSVVTVPSSSLGTQTYICNVNHKPSNTKVDKRVEPKS |
| | | | CDKTHTCPPCPAPELLGGPSVFLFPPKPKDTLMISRTPEVTCVVVD |
| | | | VSHEDPEVKFNWYVDGVEVHNAKTKPREEQYASTYRVVSVLTV |
| | | | LHQDWLNGKEYKCKVSNKALPAPIEKTISKAKGQPREPQVYTLPP |
| | | | SREEMTKNQVSLTCLVKGFYPSDIAVEWESNGQPENNYKTTPPV |
| | | | LDSDGSFFLYSKLTVDKSRWQQGNVFSCSVMHEALHNHYTQKSL |
| | | | SLSPG |
| 1470 | ATX-P-3454 | HC IgG1-Fc aa | QVQLVQSGPELKKPGASVKVSCKASGYTFTNYAVNWVRQAPGQ |
| | | | GLEWMGWINTNTGHPTYAQGFTGRFVFSLDTSVSTAYLQISSLK |
| | | | AEDTAVYYCARDSSSWGYWGQGTLVTVSSASTKGPSVFPLAPSS |
| | | | KSTSGGTAALGCLVKDYFPEPVTVSWNSGALTSGVHTFPAVLQS |
| | | | SGLYSLSSVVTVPSSSLGTQTYICNVNHKPSNTKVDKRVEPKSCD |
| | | | KTHTCPPCPAPELLGGPSVFLFPPKPKDTLMISRTPEVTCVVVDVS |
| | | | HEDPEVKFNWYVDGVEVHNAKTKPREEQYASTYRVVSVLTVLH |
| | | | QDWLNGKEYKCKVSNKALPAPIEKTISKAKGQPREPQVYTLPPSR |
| | | | EEMTKNQVSLTCLVKGFYPSDIAVEWESNGQPENNYKTTPPVLD |
| | | | SDGSFFLYSKLTVDKSRWQQGNVFSCSVMHEALHNHYTQKSLSL |
| | | | SPG |
| 1471 | ATX-P-3455 | HC IgG1-Fc aa | QVQLQESGPGLVTPSGTLSLTCAVSGDSISSDNWWSWVRQPPGK |
| | | | GLEWIGEIYHSENTNYNPSLKSRVTISVDKSKNQFSLRLNSVTAA |
| | | | DTAMYYCARGRELTGLFDYWGQGTLVTVSSASTKGPSVFPLAPS |
| | | | SKSTSGGTAALGCLVKDYFPEPVTVSWNSGALTSGVHTFPAVLQ |
| | | | SSGLYSLSSVVTVPSSSLGTQTYICNVNHKPSNTKVDKRVEPKSC |
| | | | DKTHTCPPCPAPELLGGPSVFLFPPKPKDTLMISRTPEVTCVVVDV |
| | | | SHEDPEVKFNWYVDGVEVHNAKTKPREEQYASTYRVVSVLTVL |
| | | | HQDWLNGKEYKCKVSNKALPAPIEKTISKAKGQPREPQVYTLPPS |
| | | | REEMTKNQVSLTCLVKGFYPSDIAVEWESNGQPENNYKTTPPVL |
| | | | DSDGSFFLYSKLTVDKSRWQQGNVFSCSVMHEALHNHYTQKSLS |
| | | | LSPG |
| 1472 | ATX-P-3456 | HC IgG1-Fc aa | QVQLQESGPGLVKPSGTLSLTCAVSGGSISSNNWWSWVRQPPGK |
| | | | GLEWIGDIYHSGNTNYNPSLKSRVTLSVDMSKNQFSLKLNSVTA |
| | | | ADTAVYYCARGGIAVTAYFDYWGQGTLVTVSSASTKGPSVFPLA |
| | | | PSSKSTSGGTAALGCLVKDYFPEPVTVSWNSGALTSGVHTFPAVL |
| | | | QSSGLYSLSSVVTVPSSSLGTQTYICNVNHKPSNTKVDKRVEPKS |
| | | | CDKTHTCPPCPAPELLGGPSVFLFPPKPKDTLMISRTPEVTCVVVD |
| | | | VSHEDPEVKFNWYVDGVEVHNAKTKPREEQYASTYRVVSVLTV |
| | | | LHQDWLNGKEYKCKVSNKALPAPIEKTISKAKGQPREPQVYTLPP |
| | | | SREEMTKNQVSLTCLVKGFYPSDIAVEWESNGQPENNYKTTPPV |
| | | | LDSDGSFFLYSKLTVDKSRWQQGNVFSCSVMHEALHNHYTQKSL |
| | | | SLSPG |
| 1473 | ATX-P-3458 | HC IgG1-Fc aa | QVQLVQSGAEVKKPGASVKVSCKASGYTFTGYYLHWVRQAPGQ |
| | | | GLEWMGWINPHSGGTIYAQKFQDRVTMTRDTSISTAYMELSRLR |
| | | | SDDTAVYYCANWNSGDSYYYYMDVWGKGTTVTVSSASTKGPS |
| | | | VFPLAPSSKSTSGGTAALGCLVKDYFPEPVTVSWNSGALTSGVHT |
| | | | FPAVLQSSGLYSLSSVVTVPSSSLGTQTYICNVNHKPSNTKVDKR |
| | | | VEPKSCDKTHTCPPCPAPELLGGPSVFLFPPKPKDTLMISRTPEVT |
| | | | CVVVDVSHEDPEVKFNWYVDGVEVHNAKTKPREEQYASTYRVV |
| | | | SVLTVLHQDWLNGKEYKCKVSNKALPAPIEKTISKAKGQPREPQ |
| | | | VYTLPPSREEMTKNQVSLTCLVKGFYPSDIAVEWESNGQPENNY |
| | | | KTTPPVLDSDGSFFLYSKLTVDKSRWQQGNVFSCSVMHEALHNH |
| | | | YTQKSLSLSPG |
| 1474 | ATX-P-3459 | HC IgG1-Fc aa | QVQLQESGPGLVKPSGTLSLTCAVSGGSISSDNWWNWVRQPPGK |
| | | | GLEWIGKIYHSGNTNYNPSLKSRVTISVDESKNQFSLRLYSVTAA |
| | | | DTAVYYCARGVDFWSGSHMDVWGKGTTVTVSSASTKGPSVFPL |
| | | | APSSKSTSGGTAALGCLVKDYFPEPVTVSWNSGALTSGVHTFPAV |
| | | | LQSSGLYSLSSVVTVPSSSLGTQTYICNVNHKPSNTKVDKRVEPK |
| | | | SCDKTHTCPPCPAPELLGGPSVFLFPPKPKDTLMISRTPEVTCVVV |
| | | | DVSHEDPEVKFNWYVDGVEVHNAKTKPREEQYASTYRVVSVLT |
| | | | VLHQDWLNGKEYKCKVSNKALPAPIEKTISKAKGQPREPQVYTL |
| | | | PPSREEMTKNQVSLTCLVKGFYPSDIAVEWESNGQPENNYKTTPP |
| | | | VLDSDGSFFLYSKLTVDKSRWQQGNVFSCSVMHEALHNHYTQK |
| | | | SLSLSPG |
| 1475 | ATX-P-3462 | HC IgG1-Fc aa | QVQLQESGPGLVKPSGTLSLTCAVSGGSISSNNWWSWVRQAPGK |
| | | | GLEWIGKIYQSGSTMYNPSLKSRVTMSVDKSKNQFSLILSSVTAA |
| | | | DTAVYYCARDKPPLLGAFDYWGQGTLVTVSSASTKGPSVFPLAP |
| | | | SSKSTSGGTAALGCLVKDYFPEPVTVSWNSGALTSGVHTFPAVL |
| | | | QSSGLYSLSSVVTVPSSSLGTQTYICNVNHKPSNTKVDKRVEPKS |
| | | | CDKTHTCPPCPAPELLGGPSVFLFPPKPKDTLMISRTPEVTCVVVD |
| | | | VSHEDPEVKFNWYVDGVEVHNAKTKPREEQYASTYRVVSVLTV |
| | | | LHQDWLNGKEYKCKVSNKALPAPIEKTISKAKGQPREPQVYTLPP |
| | | | SREEMTKNQVSLTCLVKGFYPSDIAVEWESNGQPENNYKTTPPV |
| | | | LDSDGSFFLYSKLTVDKSRWQQGNVFSCSVMHEALHNHYTQKSL |
| | | | SLSPG |
| 1476 | ATX-P-3463 | HC IgG1-Fc aa | QVQLVESGGGVVQPGRSLRLSCAASGFTFSSYAMHWVRQAPGK |
| | | | GLEWVAVISYDGSNKYYADSVKGRFTISRDNSKNTLSLQMNSLR |
| | | | AEDTAVYYCAKRGGYSYGPFEHWGQGTLVTVSSASTKGPSVFPL |
| | | | APSSKSTSGGTAALGCLVKDYFPEPVTVSWNSGALTSGVHTFPAV |
| | | | LQSSGLYSLSSVVTVPSSSLGTQTYICNVNHKPSNTKVDKRVEPK |
| | | | SCDKTHTCPPCPAPELLGGPSVFLFPPKPKDTLMISRTPEVTCVVV |
| | | | DVSHEDPEVKFNWYVDGVEVHNAKTKPREEQYASTYRVVSVLT |
| | | | VLHQDWLNGKEYKCKVSNKALPAPIEKTISKAKGQPREPQVYTL |
| | | | PPSREEMTKNQVSLTCLVKGFYPSDIAVEWESNGQPENNYKTTPP |
| | | | VLDSDGSFFLYSKLTVDKSRWQQGNVFSCSVMHEALHNHYTQK |
| | | | SLSLSPG |
| 1477 | ATX-P-3466 | HC IgG1-Fc aa | QVQLVQSGSELKKPGASVKVSCKASGYTFTSYTMNWVRQAPGQ |
| | | | GLEWVGWINTATGTPTYAQGFTGRYVFSLDTSVSTAYLQISGLK |
| | | | AEDTAVYFCARYSGSHSFDYWGQGTLVTVSSASTKGPSVFPLAPS |
| | | | SKSTSGGTAALGCLVKDYFPEPVTVSWNSGALTSGVHTFPAVLQ |
| | | | SSGLYSLSSVVTVPSSSLGTQTYICNVNHKPSNTKVDKRVEPKSC |
| | | | DKTHTCPPCPAPELLGGPSVFLFPPKPKDTLMISRTPEVTCVVVDV |
| | | | SHEDPEVKFNWYVDGVEVHNAKTKPREEQYASTYRVVSVLTVL |
| | | | HQDWLNGKEYKCKVSNKALPAPIEKTISKAKGQPREPQVYTLPPS |
| | | | REEMTKNQVSLTCLVKGFYPSDIAVEWESNGQPENNYKTTPPVL |
| | | | DSDGSFFLYSKLTVDKSRWQQGNVFSCSVMHEALHNHYTQKSLS |
| | | | LSPG |
| 1478 | ATX-P-3467 | HC IgG1-Fc aa | QVQLQESGPGLVKPSGTLSLTCAVSGGSISSDYWWSWVRQSPGK |
| | | | GLEWIGKIYHSGNTNHNPSLKSRVTISIDKSRNQFSLNLNSVTAAD |
| | | | TAVYYCAREGLELPHMDVWGKGTTVTVSSASTKGPSVFPLAPSS |
| | | | KSTSGGTAALGCLVKDYFPEPVTVSWNSGALTSGVHTFPAVLQS |
| | | | SGLYSLSSVVTVPSSSLGTQTYICNVNHKPSNTKVDKRVEPKSCD |
| | | | KTHTCPPCPAPELLGGPSVFLFPPKPKDTLMISRTPEVTCVVVDVS |
| | | | HEDPEVKFNWYVDGVEVHNAKTKPREEQYASTYRVVSVLTVLH |
| | | | QDWLNGKEYKCKVSNKALPAPIEKTISKAKGQPREPQVYTLPPSR |
| | | | EEMTKNQVSLTCLVKGFYPSDIAVEWESNGQPENNYKTTPPVLD |
| | | | SDGSFFLYSKLTVDKSRWQQGNVFSCSVMHEALHNHYTQKSLSL |
| | | | SPG |
| 1479 | ATX-P-3468 | HC IgG1-Fc aa | QVQLVESGGGLVQPGRSLRLSCAASGFTFSSYAMHWVRQAPGK |
| | | | GLEWVTVISYDGSNKYYADSVKGRFTISRDNSKNTLYLQMNSLR |
| | | | AEDTAVYYCAKRGNWNYGPFHYWGQGTLVTVSSASTKGPSVFP |
| | | | LAPSSKSTSGGTAALGCLVKDYFPEPVTVSWNSGALTSGVHTFPA |
| | | | VLQSSGLYSLSSVVTVPSSSLGTQTYICNVNHKPSNTKVDKRVEP |
| | | | KSCDKTHTCPPCPAPELLGGPSVFLFPPKPKDTLMISRTPEVTCVV |
| | | | VDVSHEDPEVKFNWYVDGVEVHNAKTKPREEQYASTYRVVSVL |
| | | | TVLHQDWLNGKEYKCKVSNKALPAPIEKTISKAKGQPREPQVYT |
| | | | LPPSREEMTKNQVSLTCLVKGFYPSDIAVEWESNGQPENNYKTTP |
| | | | PVLDSDGSFFLYSKLTVDKSRWQQGNVFSCSVMHEALHNHYTQ |
| | | | KSLSLSPG |
| 1480 | ATX-P-3469 | HC IgG1-Fc aa | QVQLVESGGGVVQPGRSLRLSCAASGFTFSAYAIHWVRQAPGKG |
| | | | LEWVAVISYDGSNKKYADSVKGRFTISRDNSKNTLDLEMNSLRA |
| | | | EDTAVYYCAKGLPFDYWGQGTLVTVSSASTKGPSVFPLAPSSKST |
| | | | SGGTAALGCLVKDYFPEPVTVSWNSGALTSGVHTFPAVLQSSGL |
| | | | YSLSSVVTVPSSSLGTQTYICNVNHKPSNTKVDKRVEPKSCDKTH |
| | | | TCPPCPAPELLGGPSVFLFPPKPKDTLMISRTPEVTCVVVDVSHED |
| | | | PEVKFNWYVDGVEVHNAKTKPREEQYASTYRVVSVLTVLHQD |
| | | | WLNGKEYKCKVSNKALPAPIEKTISKAKGQPREPQVYTLPPSREE |
| | | | MTKNQVSLTCLVKGFYPSDIAVEWESNGQPENNYKTTPPVLDSD |
| | | | GSFFLYSKLTVDKSRWQQGNVFSCSVMHEALHNHYTQKSLSLSP |
| | | | G |
| 1481 | ATX-P-3470 | HC IgG1-Fc aa | QVQLVQSGSDLKKPGASVKVSCKASGYTFTSYTMNWVRQAPGQ |
| | | | GLEWMGWINTNTGTPTYAQGFTGRFVFSLDTSVSTAYLQISSLKA |
| | | | EDTAVYYCTRYTGNYSFDYWGQGTLVTVSSASTKGPSVFPLAPS |
| | | | SKSTSGGTAALGCLVKDYFPEPVTVSWNSGALTSGVHTFPAVLQ |
| | | | SSGLYSLSSVVTVPSSSLGTQTYICNVNHKPSNTKVDKRVEPKSC |
| | | | DKTHTCPPCPAPELLGGPSVFLFPPKPKDTLMISRTPEVTCVVVDV |
| | | | SHEDPEVKFNWYVDGVEVHNAKTKPREEQYASTYRVVSVLTVL |
| | | | HQDWLNGKEYKCKVSNKALPAPIEKTISKAKGQPREPQVYTLPPS |
| | | | REEMTKNQVSLTCLVKGFYPSDIAVEWESNGQPENNYKTTPPVL |
| | | | DSDGSFFLYSKLTVDKSRWQQGNVFSCSVMHEALHNHYTQKSLS |
| | | | LSPG |
| 1482 | ATX-P-3471 | HC IgG1-Fc aa | EVQLVESGGVLVQPGGSLRLSCAASGFTFRSYAMSWVRQAPGKG |
| | | | LEWVSAISGSGDSTYFADSVKGRFTISRDNSKNTLSLQMNSLRAE |
| | | | DTAVYYCASILGYCSGTSCYGLEDNWGQGTLVTVSSASTKGPSV |
| | | | FPLAPSSKSTSGGTAALGCLVKDYFPEPVTVSWNSGALTSGVHTF |
| | | | PAVLQSSGLYSLSSVVTVPSSSLGTQTYICNVNHKPSNTKVDKRV |
| | | | EPKSCDKTHTCPPCPAPELLGGPSVFLFPPKPKDTLMISRTPEVTC |
| | | | VVVDVSHEDPEVKFNWYVDGVEVHNAKTKPREEQYASTYRVVS |
| | | | VLTVLHQDWLNGKEYKCKVSNKALPAPIEKTISKAKGQPREPQV |
| | | | YTLPPSREEMTKNQVSLTCLVKGFYPSDIAVEWESNGQPENNYK |
| | | | TTPPVLDSDGSFFLYSKLTVDKSRWQQGNVFSCSVMHEALHNHY |
| | | | TQKSLSLSPG |
| 1483 | ATX-P-3472 | HC IgG1-Fc aa | QVQLQESGPGLVKPSGTLSLTCAVSGGSISNDNWWSWVRQSPGK |
| | | | GLEWIGKIYHSEFTNYNPSLRSRVTISVDKSKNQFSLELTSVTAAD |
| | | | TAVYYCAREYQNYMDVWGKGTTVTVSSASTKGPSVFPLAPSSKS |
| | | | TSGGTAALGCLVKDYFPEPVTVSWNSGALTSGVHTFPAVLQSSG |
| | | | LYSLSSVVTVPSSSLGTQTYICNVNHKPSNTKVDKRVEPKSCDKT |
| | | | HTCPPCPAPELLGGPSVFLFPPKPKDTLMISRTPEVTCVVVDVSHE |
| | | | DPEVKFNWYVDGVEVHNAKTKPREEQYASTYRVVSVLTVLHQD |
| | | | WLNGKEYKCKVSNKALPAPIEKTISKAKGQPREPQVYTLPPSREE |
| | | | MTKNQVSLTCLVKGFYPSDIAVEWESNGQPENNYKTTPPVLDSD |
| | | | GSFFLYSKLTVDKSRWQQGNVFSCSVMHEALHNHYTQKSLSLSP |
| | | | G |
| 1484 | ATX-P-3361 | HC IgG1-Fc aa | QVQLQESGPGLVKPSGTLSLTCVVSGDSISSNNWWSWVRQPPGK |
| | | | GLEWIGQIYHSGITNYNPSLKSRVTISVDKSKNQFSLELTSVTAAD |
| | | | AAVYYCARAQWELRAGWFDPWGQGTLVTVSSASTKGPSVFPLA |
| | | | PSSKSTSGGTAALGCLVKDYFPEPVTVSWNSGALTSGVHTFPAVL |
| | | | QSSGLYSLSSVVTVPSSSLGTQTYICNVNHKPSNTKVDKRVEPKS |
| | | | CDKTHTCPPCPAPELLGGPSVFLFPPKPKDTLMISRTPEVTCVVVD |
| | | | VSHEDPEVKFNWYVDGVEVHNAKTKPREEQYASTYRVVSVLTV |
| | | | LHQDWLNGKEYKCKVSNKALPAPIEKTISKAKGQPREPQVYTLPP |
| | | | SREEMTKNQVSLTCLVKGFYPSDIAVEWESNGQPENNYKTTPPV |
| | | | LDSDGSFFLYSKLTVDKSRWQQGNVFSCSVMHEALHNHYTQKSL |
| | | | SLSPG |
| 1485 | ATX-P-3366 | HC IgG1-Fc aa | EVQLVESGGGLVKPGGTLTLSCAASGFTFSNAWMSWVRQAPGK |
| | | | GLEWVGRIKSKTDGGTTDYAAPVKGRFTISRDDSKNTLYLQMNS |
| | | | LKTEDTAVYYCTPRYNSDFDYWGQGTLVTVSSASTKGPSVFPLA |
| | | | PSSKSTSGGTAALGCLVKDYFPEPVTVSWNSGALTSGVHTFPAVL |
| | | | QSSGLYSLSSVVTVPSSSLGTQTYICNVNHKPSNTKVDKRVEPKS |
| | | | CDKTHTCPPCPAPELLGGPSVFLFPPKPKDTLMISRTPEVTCVVVD |
| | | | VSHEDPEVKFNWYVDGVEVHNAKTKPREEQYASTYRVVSVLTV |
| | | | LHQDWLNGKEYKCKVSNKALPAPIEKTISKAKGQPREPQVYTLPP |
| | | | SREEMTKNQVSLTCLVKGFYPSDIAVEWESNGQPENNYKTTPPV |
| | | | LDSDGSFFLYSKLTVDKSRWQQGNVFSCSVMHEALHNHYTQKSL |
| | | | SLSPG |
| 1486 | ATX-P-3376 | HC IgG1-Fc aa | QVQLQESGPGLVKPSETLSLTCTVSGGSISSYYWSWIRQPPGKGL |
| | | | EWIGYIYYSGFTKYNPSLKSRVTISVDTSKNQFSLKLSSVTAADTA |
| | | | VYYCATHPRGYNYGPFDYWGQGTLVTVSSASTKGPSVFPLAPSS |
| | | | KSTSGGTAALGCLVKDYFPEPVTVSWNSGALTSGVHTFPAVLQS |
| | | | SGLYSLSSVVTVPSSSLGTQTYICNVNHKPSNTKVDKRVEPKSCD |
| | | | KTHTCPPCPAPELLGGPSVFLFPPKPKDTLMISRTPEVTCVVVDVS |
| | | | HEDPEVKFNWYVDGVEVHNAKTKPREEQYASTYRVVSVLTVLH |
| | | | QDWLNGKEYKCKVSNKALPAPIEKTISKAKGQPREPQVYTLPPSR |
| | | | EEMTKNQVSLTCLVKGFYPSDIAVEWESNGQPENNYKTTPPVLD |
| | | | SDGSFFLYSKLTVDKSRWQQGNVFSCSVMHEALHNHYTQKSLSL |
| | | | SPG |
| 1487 | ATX-P-3377 | HC IgG1-Fc aa | QVQLQESGPGLVKPSETLSLTCTVSGGSVNSGRYYWSWIRQPPG |
| | | | KGLEWIGYIYSSGYTNYNPSLKSRVTMLLDTSKNQFSLKLNSVTA |
| | | | ADTAVYYCARSRGYRYGPFDYWGQGTLVTVSSASTKGPSVFPLA |
| | | | PSSKSTSGGTAALGCLVKDYFPEPVTVSWNSGALTSGVHTFPAVL |
| | | | QSSGLYSLSSVVTVPSSSLGTQTYICNVNHKPSNTKVDKRVEPKS |
| | | | CDKTHTCPPCPAPELLGGPSVFLFPPKPKDTLMISRTPEVTCVVVD |
| | | | VSHEDPEVKFNWYVDGVEVHNAKTKPREEQYASTYRVVSVLTV |
| | | | LHQDWLNGKEYKCKVSNKALPAPIEKTISKAKGQPREPQVYTLPP |
| | | | SREEMTKNQVSLTCLVKGFYPSDIAVEWESNGQPENNYKTTPPV |
| | | | LDSDGSFFLYSKLTVDKSRWQQGNVFSCSVMHEALHNHYTQKSL |
| | | | SLSPG |
| 1488 | ATX-P-3418 | HC IgG1-Fc aa | QVQLVQSGSELKKPGASVKVSCEASGYTFTSYAMNWVRQAPGQ |
| | | | GLEWMGWINTNTGTPTYAQGFTGRFVFSLDTSVSTAYLQISSLKA |
| | | | EDTAVYYCASHSTSFDYWGQGTLVTVSSASTKGPSVFPLAPSSKS |
| | | | TSGGTAALGCLVKDYFPEPVTVSWNSGALTSGVHTFPAVLQSSG |
| | | | LYSLSSVVTVPSSSLGTQTYICNVNHKPSNTKVDKRVEPKSCDKT |
| | | | HTCPPCPAPELLGGPSVFLFPPKPKDTLMISRTPEVTCVVVDVSHE |
| | | | DPEVKFNWYVDGVEVHNAKTKPREEQYASTYRVVSVLTVLHQD |
| | | | WLNGKEYKCKVSNKALPAPIEKTISKAKGQPREPQVYTLPPSREE |
| | | | MTKNQVSLTCLVKGFYPSDIAVEWESNGQPENNYKTTPPVLDSD |
| | | | GSFFLYSKLTVDKSRWQQGNVFSCSVMHEALHNHYTQKSLSLSP |
| | | | G |
| 1489 | ATX-P-3420 | HC IgG1-Fc aa | QVQLQQWGAGLVKPSETLSLTCAVHGGSFSDYYLTWIRQPPGKG |
| | | | LEWIGEINHSGSTNYNPSLKSRVTLSIDTSKNQFSLKLSSVTAADT |
| | | | AVYYCARGSEDYYYYMDVWGKGTTVTVSSASTKGPSVFPLAPS |
| | | | SKSTSGGTAALGCLVKDYFPEPVTVSWNSGALTSGVHTFPAVLQ |
| | | | SSGLYSLSSVVTVPSSSLGTQTYICNVNHKPSNTKVDKRVEPKSC |
| | | | DKTHTCPPCPAPELLGGPSVFLFPPKPKDTLMISRTPEVTCVVVDV |
| | | | SHEDPEVKFNWYVDGVEVHNAKTKPREEQYASTYRVVSVLTVL |
| | | | HQDWLNGKEYKCKVSNKALPAPIEKTISKAKGQPREPQVYTLPPS |
| | | | REEMTKNQVSLTCLVKGFYPSDIAVEWESNGQPENNYKTTPPVL |
| | | | DSDGSFFLYSKLTVDKSRWQQGNVFSCSVMHEALHNHYTQKSLS |
| | | | LSPG |
| 1490 | ATX-P-3426 | HC IgG1-Fc aa | EVQLVQSGAEVKKPGESLKISCKGSGYIFTSYWIGWVRQMPGKG |
| | | | LEWMGIIYPGDSDTRYSPSFQGQVTISADKSIITAYLQWSSLKASD |
| | | | TAMYYCARHDYFDIGGYFDYWGQGTLVTVSSASTKGPSVFPLAP |
| | | | SSKSTSGGTAALGCLVKDYFPEPVTVSWNSGALTSGVHTFPAVL |
| | | | QSSGLYSLSSVVTVPSSSLGTQTYICNVNHKPSNTKVDKRVEPKS |
| | | | CDKTHTCPPCPAPELLGGPSVFLFPPKPKDTLMISRTPEVTCVVVD |
| | | | VSHEDPEVKFNWYVDGVEVHNAKTKPREEQYASTYRVVSVLTV |
| | | | LHQDWLNGKEYKCKVSNKALPAPIEKTISKAKGQPREPQVYTLPP |
| | | | SREEMTKNQVSLTCLVKGFYPSDIAVEWESNGQPENNYKTTPPV |
| | | | LDSDGSFFLYSKLTVDKSRWQQGNVFSCSVMHEALHNHYTQKSL |
| | | | SLSPG |
| 1491 | ATX-P-3432 | HC IgG1-Fc aa | QVQLVQSGAEVKKPGASVKVSCKADGYTFTDYYMHWVRQAPG |
| | | | QGHEWMGWINPNSGVTYYAQKFQGRVTMTRDTSISTAYMELNR |
| | | | LRSDDTAVYYCARDRTFYFDYWGQGTLVTVSSASTKGPSVFPLA |
| | | | PSSKSTSGGTAALGCLVKDYFPEPVTVSWNSGALTSGVHTFPAVL |
| | | | QSSGLYSLSSVVTVPSSSLGTQTYICNVNHKPSNTKVDKRVEPKS |
| | | | CDKTHTCPPCPAPELLGGPSVFLFPPKPKDTLMISRTPEVTCVVVD |
| | | | VSHEDPEVKFNWYVDGVEVHNAKTKPREEQYASTYRVVSVLTV |
| | | | LHQDWLNGKEYKCKVSNKALPAPIEKTISKAKGQPREPQVYTLPP |
| | | | SREEMTKNQVSLTCLVKGFYPSDIAVEWESNGQPENNYKTTPPV |
| | | | LDSDGSFFLYSKLTVDKSRWQQGNVFSCSVMHEALHNHYTQKSL |
| | | | SLSPG |
| 1492 | ATX-P-3433 | HC IgG1-Fc aa | QVQLVQSGAEVKKPGASVKVSCKASGYTFTDYYMHWVRQAPG |
| | | | QGLEWMGWINPNNGGTDYAQKFQGRVTMTRDTSISTAYMELHR |
| | | | LRSDDTAVYFCARGVYDVVVPTAIVNWEDPWGQGTLVTVSSAS |
| | | | TKGPSVFPLAPSSKSTSGGTAALGCLVKDYFPEPVTVSWNSGALT |
| | | | SGVHTFPAVLQSSGLYSLSSVVTVPSSSLGTQTYICNVNHKPSNTK |
| | | | VDKRVEPKSCDKTHTCPPCPAPELLGGPSVFLFPPKPKDTLMISRT |
| | | | PEVTCVVVDVSHEDPEVKFNWYVDGVEVHNAKTKPREEQYAST |
| | | | YRVVSVLTVLHQDWLNGKEYKCKVSNKALPAPIEKTISKAKGQP |
| | | | REPQVYTLPPSREEMTKNQVSLTCLVKGFYPSDIAVEWESNGQPE |
| | | | NNYKTTPPVLDSDGSFFLYSKLTVDKSRWQQGNVFSCSVMHEAL |
| | | | HNHYTQKSLSLSPG |
| 1493 | ATX-P-3438 | HC IgG1-Fc aa | QVQLQESGPGLVKPSGTLSLTCAVSGDSISNDYWWNWVRQPPGK |
| | | | GLEWIGEIYHSGHTNYNPSLKSRVTISVDKSKNQLSLKLTSVNAA |
| | | | DTAVYYCARGGTEITGYMDVWGKGTTVTVSSASTKGPSVFPLAP |
| | | | SSKSTSGGTAALGCLVKDYFPEPVTVSWNSGALTSGVHTFPAVL |
| | | | QSSGLYSLSSVVTVPSSSLGTQTYICNVNHKPSNTKVDKRVEPKS |
| | | | CDKTHTCPPCPAPELLGGPSVFLFPPKPKDTLMISRTPEVTCVVVD |
| | | | VSHEDPEVKFNWYVDGVEVHNAKTKPREEQYASTYRVVSVLTV |
| | | | LHQDWLNGKEYKCKVSNKALPAPIEKTISKAKGQPREPQVYTLPP |
| | | | SREEMTKNQVSLTCLVKGFYPSDIAVEWESNGQPENNYKTTPPV |
| | | | LDSDGSFFLYSKLTVDKSRWQQGNVFSCSVMHEALHNHYTQKSL |
| | | | SLSPG |
| 1494 | ATX-P-3441 | HC IgG1-Fc aa | QVQLQESGPGLVKPSGTLSLTCAVSGASIRSGHWWSWVRQPPGK |
| | | | GLEWIGEIYHSGNTNYNPSLKSRVTLSVDKSKNQFSLKLSSVTAA |
| | | | DTAVYYCARGHYGDYVVYFDYWGQGTLVTVSSASTKGPSVFPL |
| | | | APSSKSTSGGTAALGCLVKDYFPEPVTVSWNSGALTSGVHTFPAV |
| | | | LQSSGLYSLSSVVTVPSSSLGTQTYICNVNHKPSNTKVDKRVEPK |
| | | | SCDKTHTCPPCPAPELLGGPSVFLFPPKPKDTLMISRTPEVTCVVV |
| | | | DVSHEDPEVKFNWYVDGVEVHNAKTKPREEQYASTYRVVSVLT |
| | | | VLHQDWLNGKEYKCKVSNKALPAPIEKTISKAKGQPREPQVYTL |
| | | | PPSREEMTKNQVSLTCLVKGFYPSDIAVEWESNGQPENNYKTTPP |
| | | | VLDSDGSFFLYSKLTVDKSRWQQGNVFSCSVMHEALHNHYTQK |
| | | | SLSLSPG |
| 1495 | ATX-P-3446 | HC IgG1-Fc aa | QVQLQESGPGLVKPSETLSLTCTVSGGSISSYYWSWIRQPPGKGL |
| | | | EWIGYVYYSGYTKYNPSLKSRVTISIDASKNQFSLKLTSVTAADT |
| | | | AVYYCATVESKWNYGPFAIWGQGTMVTVSSASTKGPSVFPLAPS |
| | | | SKSTSGGTAALGCLVKDYFPEPVTVSWNSGALTSGVHTFPAVLQ |
| | | | SSGLYSLSSVVTVPSSSLGTQTYICNVNHKPSNTKVDKRVEPKSC |
| | | | DKTHTCPPCPAPELLGGPSVFLFPPKPKDTLMISRTPEVTCVVVDV |
| | | | SHEDPEVKFNWYVDGVEVHNAKTKPREEQYASTYRVVSVLTVL |
| | | | HQDWLNGKEYKCKVSNKALPAPIEKTISKAKGQPREPQVYTLPPS |
| | | | REEMTKNQVSLTCLVKGFYPSDIAVEWESNGQPENNYKTTPPVL |
| | | | DSDGSFFLYSKLTVDKSRWQQGNVFSCSVMHEALHNHYTQKSLS |
| | | | LSPG |
| 1496 | ATX-P-3452 | HC IgG1-Fc aa | QVQLVQSGAEVKKPGASVKVSCKASGYTFTGYYMNWVRQAPG |
| | | | QGLEWMGWINPNSGATNYAQKFQGRVTMTRDTSISTDYMELSR |
| | | | LRSDDTAVYYCARDGAKWNHEGYYFDYWGQGTLVTVSSASTK |
| | | | GPSVFPLAPSSKSTSGGTAALGCLVKDYFPEPVTVSWNSGALTSG |
| | | | VHTFPAVLQSSGLYSLSSVVTVPSSSLGTQTYICNVNHKPSNTKV |
| | | | DKRVEPKSCDKTHTCPPCPAPELLGGPSVFLFPPKPKDTLMISRTP |
| | | | EVTCVVVDVSHEDPEVKFNWYVDGVEVHNAKTKPREEQYASTY |
| | | | RVVSVLTVLHQDWLNGKEYKCKVSNKALPAPIEKTISKAKGQPR |
| | | | EPQVYTLPPSREEMTKNQVSLTCLVKGFYPSDIAVEWESNGQPEN |
| | | | NYKTTPPVLDSDGSFFLYSKLTVDKSRWQQGNVFSCSVMHEALH |
| | | | NHYTQKSLSLSPG |

TABLE 10
Anti-C3 antibodies (LC Kappa sequences)

| SEQ ID | Antibody | | |
|---|---|---|---|
| NO: | Name: | Descriptor: | Sequence: |
| 1497 | ATX-P-3360 | LC Kappa nt | GACATCGTGATGACCCAGTCTCCAGACTCCCTGGCTGTGT |
| | | | CTCTGGGCGAGAGGGCCACCATCAACTGCAAGTCCAGCCA |
| | | | GAGTGTTTTATACAGCTCCAACAATAAGAACTACTTAGCT |
| | | | TGGTACCAGCAGAAACCAGGACAGCCTCCTAAGCTGCTCA |
| | | | TTTACTGGGCATCTAACCGGGAATCCGGGGTCCCTGACCG |
| | | | ATTCAGTGGCTCCGGGTCTGGGACAGATTTCACTCTCACC |
| | | | ATCAGCAGCCTGCAGGCTGAAGATGTGGCAGTTTATTACT |
| | | | GTCAGCAATATTATAGTACTCCGTACACTTTTGGCCAGGG |
| | | | GACCAAGCTGGAGATCAAACGTACGGTAGCTGCCCCTTCA |
| | | | GTTTTTATCTTTCCGCCGTCTGACGAGCAGTTAAAATCCG |
| | | | GGACCGCTTCTGTAGTTTGCCTGCTGAATAATTTTTATCC |
| | | | GCGTGAGGCTAAAGTACAATGGAAAGTCGACAATGCTTTG |
| | | | CAGTCGGGAAATTCACAGGAAAGTGTTACGGAGCAGGATT |
| | | | CTAAAGATTCCACATATTCACTCAGCTCCACCCTTACACT |
| | | | GAGCAAAGCCGACTATGAAAAACATAAAGTTTACGCATGT |
| | | | GAGGTGACGCACCAAGGATTATCCAGTCCGGTCACAAAAT |
| | | | CGTTTAACCGCGGTGAGTGT |
| 1498 | ATX-P-3362 | LC Kappa nt | GACATCGTGATGACCCAGTCTCCAGACTCCCTGGCTGTGT |
| | | | CTCTGGGCGAGAGGGCCACCATCAACTGCAAGTCCAGCCA |
| | | | GAGTGTTTTATACAGCTCCAACAATAAGAACTACTTAGCT |
| | | | TGGTACCAGCAGAAACCAGGACAGCCTCCTAAGCTGCTCA |
| | | | TTTACTGGGCATCTAACCGGGAATCCGGGGTCCCTGACCG |
| | | | ATTCAGTGGCTCCGGGTCTGGGACAGATTTCACTCTCACC |
| | | | ATCAGCAGCCTGCAGGCTGAAGATGTGGCAGTTTATTACT |
| | | | GTCAGCAATATTATAGTACTCCGTACACTTTTGGCCAGGG |
| | | | GACCAAGCTGGAGATCAAACGTACGGTAGCTGCCCCTTCA |
| | | | GTTTTTATCTTTCCGCCGTCTGACGAGCAGTTAAAATCCG |
| | | | GGACCGCTTCTGTAGTTTGCCTGCTGAATAATTTTTATCC |
| | | | GCGTGAGGCTAAAGTACAATGGAAAGTCGACAATGCTTTG |
| | | | CAGTCGGGAAATTCACAGGAAAGTGTTACGGAGCAGGATT |
| | | | CTAAAGATTCCACATATTCACTCAGCTCCACCCTTACACT |
| | | | GAGCAAAGCCGACTATGAAAAACATAAAGTTTACGCATGT |
| | | | GAGGTGACGCACCAAGGATTATCCAGTCCGGTCACAAAAT |
| | | | CGTTTAACCGCGGTGAGTGT |
| 1499 | ATX-P-3363 | LC Kappa nt | GACATCGTGATGACCCAGTCTCCAGACTCCCTGGCTGTGT |
| | | | CTCTGGGCGAGAGGGCCACCATCAACTGCAAGTCCAGCCA |
| | | | GAGTGTTTTATACAGCTCCAACAATAAGAACTACTTAGCT |
| | | | TGGTACCAGCAGAAACCAGGACAGCCTCCTAAGCTGCTCA |
| | | | TTTACTGGGCATCTAACCGGGAATCCGGGGTCCCTGACCG |
| | | | ATTCAGTGGCTCCGGGTCTGGGACAGATTTCACTCTCACC |
| | | | ATCAGCAGCCTGCAGGCTGAAGATGTGGCAGTTTATTACT |
| | | | GTCAGCAATATTATAGTACTCCGTACACTTTTGGCCAGGG |
| | | | GACCAAGCTGGAGATCAAACGTACGGTAGCTGCCCCTTCA |
| | | | GTTTTTATCTTTCCGCCGTCTGACGAGCAGTTAAAATCCG |
| | | | GGACCGCTTCTGTAGTTTGCCTGCTGAATAATTTTTATCC |
| | | | GCGTGAGGCTAAAGTACAATGGAAAGTCGACAATGCTTTG |
| | | | CAGTCGGGAAATTCACAGGAAAGTGTTACGGAGCAGGATT |
| | | | CTAAAGATTCCACATATTCACTCAGCTCCACCCTTACACT |
| | | | GAGCAAAGCCGACTATGAAAAACATAAAGTTTACGCATGT |
| | | | GAGGTGACGCACCAAGGATTATCCAGTCCGGTCACAAAAT |
| | | | CGTTTAACCGCGGTGAGTGT |
| 1500 | ATX-P-3365 | LC Kappa nt | GACATCGTGATGACCCAGTCTCCAGACTCCCTGGCTGTGT |
| | | | CTCTGGGCGAGAGGGCCACCATCAACTGCAAGTCCAGCCA |
| | | | GAGTGTTTTATACAGCTCCAACAATAAGAACTACTTAGCT |
| | | | TGGTACCAGCAGAAACCAGGACAGCCTCCTAAGCTGCTCA |
| | | | TTTACTGGGCATCTAACCGGGAATCCGGGGTCCCTGACCG |
| | | | ATTCAGTGGCTCCGGGTCTGGGACAGATTTCACTCTCACC |
| | | | ATCAGCAGCCTGCAGGCTGAAGATGTGGCAGTTTATTACT |
| | | | GTCAGCAATATTATAGTACTCCGTACACTTTTGGCCAGGG |
| | | | GACCAAGCTGGAGATCAAACGTACGGTAGCTGCCCCTTCA |
| | | | GTTTTTATCTTTCCGCCGTCTGACGAGCAGTTAAAATCCG |
| | | | GGACCGCTTCTGTAGTTTGCCTGCTGAATAATTTTTATCC |
| | | | GCGTGAGGCTAAAGTACAATGGAAAGTCGACAATGCTTTG |
| | | | CAGTCGGGAAATTCACAGGAAAGTGTTACGGAGCAGGATT |
| | | | CTAAAGATTCCACATATTCACTCAGCTCCACCCTTACACT |
| | | | GAGCAAAGCCGACTATGAAAAACATAAAGTTTACGCATGT |
| | | | GAGGTGACGCACCAAGGATTATCCAGTCCGGTCACAAAAT |
| | | | CGTTTAACCGCGGTGAGTGT |
| 1501 | ATX-P-3367 | LC Kappa nt | GACATCGTGATGACCCAGTCTCCAGACTCCCTGGCTGTGT |
| | | | CTCTGGGCGAGAGGGCCACCATCAACTGCAAGTCCAGCCA |
| | | | GAGTGTTTTATACAGCTCCAACAATAAGAACTACTTAGCT |
| | | | TGGTACCAGCAGAAACCAGGACAGCCTCCTAAGCTGCTCA |
| | | | TTTACTGGGCATCTAACCGGGAATCCGGGGTCCCTGACCG |
| | | | ATTCAGTGGCTCCGGGTCTGGGACAGATTTCACTCTCACC |
| | | | ATCAGCAGCCTGCAGGCTGAAGATGTGGCAGTTTATTACT |
| | | | GTCAGCAATATTATAGTACTCCGTACACTTTTGGCCAGGG |
| | | | GACCAAGCTGGAGATCAAACGTACGGTAGCTGCCCCTTCA |
| | | | GTTTTTATCTTTCCGCCGTCTGACGAGCAGTTAAAATCCG |
| | | | GGACCGCTTCTGTAGTTTGCCTGCTGAATAATTTTTATCC |
| | | | GCGTGAGGCTAAAGTACAATGGAAAGTCGACAATGCTTTG |
| | | | CAGTCGGGAAATTCACAGGAAAGTGTTACGGAGCAGGATT |
| | | | CTAAAGATTCCACATATTCACTCAGCTCCACCCTTACACT |
| | | | GAGCAAAGCCGACTATGAAAAACATAAAGTTTACGCATGT |
| | | | GAGGTGACGCACCAAGGATTATCCAGTCCGGTCACAAAAT |
| | | | CGTTTAACCGCGGTGAGTGT |
| 1502 | ATX-P-3369 | LC Kappa nt | GACATCGTGATGACCCAGTCTCCAGACTCCCTGGCTGTGT |
| | | | CTCTGGGCGAGAGGGCCACCATCAACTGCAAGTCCAGCCA |
| | | | GAGTGTTTTATACAGCTCCAACAATAAGAACTACTTAGCT |
| | | | TGGTACCAGCAGAAACCAGGACAGCCTCCTAAGCTGCTCA |
| | | | TTTACTGGGCATCTAACCGGGAATCCGGGGTCCCTGACCG |
| | | | ATTCAGTGGCTCCGGGTCTGGGACAGATTTCACTCTCACC |
| | | | ATCAGCAGCCTGCAGGCTGAAGATGTGGCAGTTTATTACT |
| | | | GTCAGCAATATTATAGTACTCCGTACACTTTTGGCCAGGG |
| | | | GACCAAGCTGGAGATCAAACGTACGGTAGCTGCCCCTTCA |
| | | | GTTTTTATCTTTCCGCCGTCTGACGAGCAGTTAAAATCCG |
| | | | GGACCGCTTCTGTAGTTTGCCTGCTGAATAATTTTTATCC |
| | | | GCGTGAGGCTAAAGTACAATGGAAAGTCGACAATGCTTTG |
| | | | CAGTCGGGAAATTCACAGGAAAGTGTTACGGAGCAGGATT |
| | | | CTAAAGATTCCACATATTCACTCAGCTCCACCCTTACACT |
| | | | GAGCAAAGCCGACTATGAAAAACATAAAGTTTACGCATGT |
| | | | GAGGTGACGCACCAAGGATTATCCAGTCCGGTCACAAAAT |
| | | | CGTTTAACCGCGGTGAGTGT |
| 1503 | ATX-P-3370 | LC Kappa nt | GACATCGTGATGACCCAGTCTCCAGACTCCCTGGCTGTGT |
| | | | CTCTGGGCGAGAGGGCCACCATCAACTGCAAGTCCAGCCA |
| | | | GAGTGTTTTATACAGCTCCAACAATAAGAACTACTTAGCT |
| | | | TGGTACCAGCAGAAACCAGGACAGCCTCCTAAGCTGCTCA |
| | | | TTTACTGGGCATCTAACCGGGAATCCGGGGTCCCTGACCG |
| | | | ATTCAGTGGCTCCGGGTCTGGGACAGATTTCACTCTCACC |
| | | | ATCAGCAGCCTGCAGGCTGAAGATGTGGCAGTTTATTACT |
| | | | GTCAGCAATATTATAGTACTCCGTACACTTTTGGCCAGGG |
| | | | GACCAAGCTGGAGATCAAACGTACGGTAGCTGCCCCTTCA |
| | | | GTTTTTATCTTTCCGCCGTCTGACGAGCAGTTAAAATCCG |
| | | | GGACCGCTTCTGTAGTTTGCCTGCTGAATAATTTTTATCC |
| | | | GCGTGAGGCTAAAGTACAATGGAAAGTCGACAATGCTTTG |
| | | | CAGTCGGGAAATTCACAGGAAAGTGTTACGGAGCAGGATT |
| | | | CTAAAGATTCCACATATTCACTCAGCTCCACCCTTACACT |
| | | | GAGCAAAGCCGACTATGAAAAACATAAAGTTTACGCATGT |
| | | | GAGGTGACGCACCAAGGATTATCCAGTCCGGTCACAAAAT |
| | | | CGTTTAACCGCGGTGAGTGT |
| 1504 | ATX-P-3371 | LC Kappa nt | GACATCGTGATGACCCAGTCTCCAGACTCCCTGGCTGTGT |
| | | | CTCTGGGCGAGAGGGCCACCATCAACTGCAAGTCCAGCCA |
| | | | GAGTGTTTTATACAGCTCCAACAATAAGAACTACTTAGCT |
| | | | TGGTACCAGCAGAAACCAGGACAGCCTCCTAAGCTGCTCA |
| | | | TTTACTGGGCATCTAACCGGGAATCCGGGGTCCCTGACCG |
| | | | ATTCAGTGGCTCCGGGTCTGGGACAGATTTCACTCTCACC |
| | | | ATCAGCAGCCTGCAGGCTGAAGATGTGGCAGTTTATTACT |
| | | | GTCAGCAATATTATAGTACTCCGTACACTTTTGGCCAGGG |
| | | | GACCAAGCTGGAGATCAAACGTACGGTAGCTGCCCCTTCA |
| | | | GTTTTTATCTTTCCGCCGTCTGACGAGCAGTTAAAATCCG |
| | | | GGACCGCTTCTGTAGTTTGCCTGCTGAATAATTTTTATCC |
| | | | GCGTGAGGCTAAAGTACAATGGAAAGTCGACAATGCTTTG |
| | | | CAGTCGGGAAATTCACAGGAAAGTGTTACGGAGCAGGATT |
| | | | CTAAAGATTCCACATATTCACTCAGCTCCACCCTTACACT |
| | | | GAGCAAAGCCGACTATGAAAAACATAAAGTTTACGCATGT |
| | | | GAGGTGACGCACCAAGGATTATCCAGTCCGGTCACAAAAT |
| | | | CGTTTAACCGCGGTGAGTGT |
| 1505 | ATX-P-3373 | LC Kappa nt | GACATCGTGATGACCCAGTCTCCAGACTCCCTGGCTGTGT |
| | | | CTCTGGGCGAGAGGGCCACCATCAACTGCAAGTCCAGCCA |
| | | | GAGTGTTTTATACAGCTCCAACAATAAGAACTACTTAGCT |
| | | | TGGTACCAGCAGAAACCAGGACAGCCTCCTAAGCTGCTCA |
| | | | TTTACTGGGCATCTAACCGGGAATCCGGGGTCCCTGACCG |
| | | | ATTCAGTGGCTCCGGGTCTGGGACAGATTTCACTCTCACC |
| | | | ATCAGCAGCCTGCAGGCTGAAGATGTGGCAGTTTATTACT |
| | | | GTCAGCAATATTATAGTACTCCGTACACTTTTGGCCAGGG |
| | | | GACCAAGCTGGAGATCAAACGTACGGTAGCTGCCCCTTCA |
| | | | GTTTTTATCTTTCCGCCGTCTGACGAGCAGTTAAAATCCG |
| | | | GGACCGCTTCTGTAGTTTGCCTGCTGAATAATTTTTATCC |
| | | | GCGTGAGGCTAAAGTACAATGGAAAGTCGACAATGCTTTG |
| | | | CAGTCGGGAAATTCACAGGAAAGTGTTACGGAGCAGGATT |
| | | | CTAAAGATTCCACATATTCACTCAGCTCCACCCTTACACT |
| | | | GAGCAAAGCCGACTATGAAAAACATAAAGTTTACGCATGT |
| | | | GAGGTGACGCACCAAGGATTATCCAGTCCGGTCACAAAAT |
| | | | CGTTTAACCGCGGTGAGTGT |
| 1506 | ATX-P-3375 | LC Kappa nt | GACATCGTGATGACCCAGTCTCCAGACTCCCTGGCTGTGT |
| | | | CTCTGGGCGAGAGGGCCACCATCAACTGCAAGTCCAGCCA |
| | | | GAGTGTTTTATACAGCTCCAACAATAAGAACTACTTAGCT |
| | | | TGGTACCAGCAGAAACCAGGACAGCCTCCTAAGCTGCTCA |
| | | | TTTACTGGGCATCTAACCGGGAATCCGGGGTCCCTGACCG |
| | | | ATTCAGTGGCTCCGGGTCTGGGACAGATTTCACTCTCACC |
| | | | ATCAGCAGCCTGCAGGCTGAAGATGTGGCAGTTTATTACT |
| | | | GTCAGCAATATTATAGTACTCCGTACACTTTTGGCCAGGG |
| | | | GACCAAGCTGGAGATCAAACGTACGGTAGCTGCCCCTTCA |
| | | | GTTTTTATCTTTCCGCCGTCTGACGAGCAGTTAAAATCCG |
| | | | GGACCGCTTCTGTAGTTTGCCTGCTGAATAATTTTTATCC |
| | | | GCGTGAGGCTAAAGTACAATGGAAAGTCGACAATGCTTTG |
| | | | CAGTCGGGAAATTCACAGGAAAGTGTTACGGAGCAGGATT |
| | | | CTAAAGATTCCACATATTCACTCAGCTCCACCCTTACACT |
| | | | GAGCAAAGCCGACTATGAAAAACATAAAGTTTACGCATGT |
| | | | GAGGTGACGCACCAAGGATTATCCAGTCCGGTCACAAAAT |
| | | | CGTTTAACCGCGGTGAGTGT |
| 1507 | ATX-P-3378 | LC Kappa nt | GACATCGTGATGACCCAGTCTCCAGACTCCCTGGCTGTGT |
| | | | CTCTGGGCGAGAGGGCCACCATCAACTGCAAGTCCAGCCA |
| | | | GAGTGTTTTATACAGCTCCAACAATAAGAACTACTTAGCT |
| | | | TGGTACCAGCAGAAACCAGGACAGCCTCCTAAGCTGCTCA |
| | | | TTTACTGGGCATCTAACCGGGAATCCGGGGTCCCTGACCG |
| | | | ATTCAGTGGCTCCGGGTCTGGGACAGATTTCACTCTCACC |
| | | | ATCAGCAGCCTGCAGGCTGAAGATGTGGCAGTTTATTACT |
| | | | GTCAGCAATATTATAGTACTCCGTACACTTTTGGCCAGGG |
| | | | GACCAAGCTGGAGATCAAACGTACGGTAGCTGCCCCTTCA |
| | | | GTTTTTATCTTTCCGCCGTCTGACGAGCAGTTAAAATCCG |
| | | | GGACCGCTTCTGTAGTTTGCCTGCTGAATAATTTTTATCC |
| | | | GCGTGAGGCTAAAGTACAATGGAAAGTCGACAATGCTTTG |
| | | | CAGTCGGGAAATTCACAGGAAAGTGTTACGGAGCAGGATT |
| | | | CTAAAGATTCCACATATTCACTCAGCTCCACCCTTACACT |
| | | | GAGCAAAGCCGACTATGAAAAACATAAAGTTTACGCATGT |
| | | | GAGGTGACGCACCAAGGATTATCCAGTCCGGTCACAAAAT |
| | | | CGTTTAACCGCGGTGAGTGT |
| 1508 | ATX-P-3382 | LC Kappa nt | GACATCGTGATGACCCAGTCTCCAGACTCCCTGGCTGTGT |
| | | | CTCTGGGCGAGAGGGCCACCATCAACTGCAAGTCCAGCCA |
| | | | GAGTGTTTTATACAGCTCCAACAATAAGAACTACTTAGCT |
| | | | TGGTACCAGCAGAAACCAGGACAGCCTCCTAAGCTGCTCA |
| | | | TTTACTGGGCATCTAACCGGGAATCCGGGGTCCCTGACCG |
| | | | ATTCAGTGGCTCCGGGTCTGGGACAGATTTCACTCTCACC |
| | | | ATCAGCAGCCTGCAGGCTGAAGATGTGGCAGTTTATTACT |
| | | | GTCAGCAATATTATAGTACTCCGTACACTTTTGGCCAGGG |
| | | | GACCAAGCTGGAGATCAAACGTACGGTAGCTGCCCCTTCA |
| | | | GTTTTTATCTTTCCGCCGTCTGACGAGCAGTTAAAATCCG |
| | | | GGACCGCTTCTGTAGTTTGCCTGCTGAATAATTTTTATCC |
| | | | GCGTGAGGCTAAAGTACAATGGAAAGTCGACAATGCTTTG |
| | | | CAGTCGGGAAATTCACAGGAAAGTGTTACGGAGCAGGATT |
| | | | CTAAAGATTCCACATATTCACTCAGCTCCACCCTTACACT |
| | | | GAGCAAAGCCGACTATGAAAAACATAAAGTTTACGCATGT |
| | | | GAGGTGACGCACCAAGGATTATCCAGTCCGGTCACAAAAT |
| | | | CGTTTAACCGCGGTGAGTGT |
| 1509 | ATX-P-3383 | LC Kappa nt | GACATCGTGATGACCCAGTCTCCAGACTCCCTGGCTGTGT |
| | | | CTCTGGGCGAGAGGGCCACCATCAACTGCAAGTCCAGCCA |
| | | | GAGTGTTTTATACAGCTCCAACAATAAGAACTACTTAGCT |
| | | | TGGTACCAGCAGAAACCAGGACAGCCTCCTAAGCTGCTCA |
| | | | TTTACTGGGCATCTAACCGGGAATCCGGGGTCCCTGACCG |
| | | | ATTCAGTGGCTCCGGGTCTGGGACAGATTTCACTCTCACC |
| | | | ATCAGCAGCCTGCAGGCTGAAGATGTGGCAGTTTATTACT |
| | | | GTCAGCAATATTATAGTACTCCGTACACTTTTGGCCAGGG |
| | | | GACCAAGCTGGAGATCAAACGTACGGTAGCTGCCCCTTCA |
| | | | GTTTTTATCTTTCCGCCGTCTGACGAGCAGTTAAAATCCG |
| | | | GGACCGCTTCTGTAGTTTGCCTGCTGAATAATTTTTATCC |
| | | | GCGTGAGGCTAAAGTACAATGGAAAGTCGACAATGCTTTG |
| | | | CAGTCGGGAAATTCACAGGAAAGTGTTACGGAGCAGGATT |
| | | | CTAAAGATTCCACATATTCACTCAGCTCCACCCTTACACT |
| | | | GAGCAAAGCCGACTATGAAAAACATAAAGTTTACGCATGT |
| | | | GAGGTGACGCACCAAGGATTATCCAGTCCGGTCACAAAAT |
| | | | CGTTTAACCGCGGTGAGTGT |
| 1510 | ATX-P-3384 | LC Kappa nt | GACATCGTGATGACCCAGTCTCCAGACTCCCTGGCTGTGT |
| | | | CTCTGGGCGAGAGGGCCACCATCAACTGCAAGTCCAGCCA |
| | | | GAGTGTTTTATACAGCTCCAACAATAAGAACTACTTAGCT |
| | | | TGGTACCAGCAGAAACCAGGACAGCCTCCTAAGCTGCTCA |
| | | | TTTACTGGGCATCTAACCGGGAATCCGGGGTCCCTGACCG |
| | | | ATTCAGTGGCTCCGGGTCTGGGACAGATTTCACTCTCACC |
| | | | ATCAGCAGCCTGCAGGCTGAAGATGTGGCAGTTTATTACT |
| | | | GTCAGCAATATTATAGTACTCCGTACACTTTTGGCCAGGG |
| | | | GACCAAGCTGGAGATCAAACGTACGGTAGCTGCCCCTTCA |
| | | | GTTTTTATCTTTCCGCCGTCTGACGAGCAGTTAAAATCCG |
| | | | GGACCGCTTCTGTAGTTTGCCTGCTGAATAATTTTTATCC |
| | | | GCGTGAGGCTAAAGTACAATGGAAAGTCGACAATGCTTTG |
| | | | CAGTCGGGAAATTCACAGGAAAGTGTTACGGAGCAGGATT |
| | | | CTAAAGATTCCACATATTCACTCAGCTCCACCCTTACACT |
| | | | GAGCAAAGCCGACTATGAAAAACATAAAGTTTACGCATGT |
| | | | GAGGTGACGCACCAAGGATTATCCAGTCCGGTCACAAAAT |
| | | | CGTTTAACCGCGGTGAGTGT |
| 1511 | ATX-P-3386 | LC Kappa nt | GACATCGTGATGACCCAGTCTCCAGACTCCCTGGCTGTGT |
| | | | CTCTGGGCGAGAGGGCCACCATCAACTGCAAGTCCAGCCA |
| | | | GAGTGTTTTATACAGCTCCAACAATAAGAACTACTTAGCT |
| | | | TGGTACCAGCAGAAACCAGGACAGCCTCCTAAGCTGCTCA |
| | | | TTTACTGGGCATCTAACCGGGAATCCGGGGTCCCTGACCG |
| | | | ATTCAGTGGCTCCGGGTCTGGGACAGATTTCACTCTCACC |
| | | | ATCAGCAGCCTGCAGGCTGAAGATGTGGCAGTTTATTACT |
| | | | GTCAGCAATATTATAGTACTCCGTACACTTTTGGCCAGGG |
| | | | GACCAAGCTGGAGATCAAACGTACGGTAGCTGCCCCTTCA |
| | | | GTTTTTATCTTTCCGCCGTCTGACGAGCAGTTAAAATCCG |
| | | | GGACCGCTTCTGTAGTTTGCCTGCTGAATAATTTTTATCC |
| | | | GCGTGAGGCTAAAGTACAATGGAAAGTCGACAATGCTTTG |
| | | | CAGTCGGGAAATTCACAGGAAAGTGTTACGGAGCAGGATT |
| | | | CTAAAGATTCCACATATTCACTCAGCTCCACCCTTACACT |
| | | | GAGCAAAGCCGACTATGAAAAACATAAAGTTTACGCATGT |
| | | | GAGGTGACGCACCAAGGATTATCCAGTCCGGTCACAAAAT |
| | | | CGTTTAACCGCGGTGAGTGT |
| 1512 | ATX-P-3387 | LC Kappa nt | GACATCGTGATGACCCAGTCTCCAGACTCCCTGGCTGTGT |
| | | | CTCTGGGCGAGAGGGCCACCATCAACTGCAAGTCCAGCCA |
| | | | GAGTGTTTTATACAGCTCCAACAATAAGAACTACTTAGCT |
| | | | TGGTACCAGCAGAAACCAGGACAGCCTCCTAAGCTGCTCA |
| | | | TTTACTGGGCATCTAACCGGGAATCCGGGGTCCCTGACCG |
| | | | ATTCAGTGGCTCCGGGTCTGGGACAGATTTCACTCTCACC |
| | | | ATCAGCAGCCTGCAGGCTGAAGATGTGGCAGTTTATTACT |
| | | | GTCAGCAATATTATAGTACTCCGTACACTTTTGGCCAGGG |
| | | | GACCAAGCTGGAGATCAAACGTACGGTAGCTGCCCCTTCA |
| | | | GTTTTTATCTTTCCGCCGTCTGACGAGCAGTTAAAATCCG |
| | | | GGACCGCTTCTGTAGTTTGCCTGCTGAATAATTTTTATCC |
| | | | GCGTGAGGCTAAAGTACAATGGAAAGTCGACAATGCTTTG |
| | | | CAGTCGGGAAATTCACAGGAAAGTGTTACGGAGCAGGATT |
| | | | CTAAAGATTCCACATATTCACTCAGCTCCACCCTTACACT |
| | | | GAGCAAAGCCGACTATGAAAAACATAAAGTTTACGCATGT |
| | | | GAGGTGACGCACCAAGGATTATCCAGTCCGGTCACAAAAT |
| | | | CGTTTAACCGCGGTGAGTGT |
| 1513 | ATX-P-3389 | LC Kappa nt | GACATCGTGATGACCCAGTCTCCAGACTCCCTGGCTGTGT |
| | | | CTCTGGGCGAGAGGGCCACCATCAACTGCAAGTCCAGCCA |
| | | | GAGTGTTTTATACAGCTCCAACAATAAGAACTACTTAGCT |
| | | | TGGTACCAGCAGAAACCAGGACAGCCTCCTAAGCTGCTCA |
| | | | TTTACTGGGCATCTAACCGGGAATCCGGGGTCCCTGACCG |
| | | | ATTCAGTGGCTCCGGGTCTGGGACAGATTTCACTCTCACC |
| | | | ATCAGCAGCCTGCAGGCTGAAGATGTGGCAGTTTATTACT |
| | | | GTCAGCAATATTATAGTACTCCGTACACTTTTGGCCAGGG |
| | | | GACCAAGCTGGAGATCAAACGTACGGTAGCTGCCCCTTCA |
| | | | GTTTTTATCTTTCCGCCGTCTGACGAGCAGTTAAAATCCG |
| | | | GGACCGCTTCTGTAGTTTGCCTGCTGAATAATTTTTATCC |
| | | | GCGTGAGGCTAAAGTACAATGGAAAGTCGACAATGCTTTG |
| | | | CAGTCGGGAAATTCACAGGAAAGTGTTACGGAGCAGGATT |
| | | | CTAAAGATTCCACATATTCACTCAGCTCCACCCTTACACT |
| | | | GAGCAAAGCCGACTATGAAAAACATAAAGTTTACGCATGT |
| | | | GAGGTGACGCACCAAGGATTATCCAGTCCGGTCACAAAAT |
| | | | CGTTTAACCGCGGTGAGTGT |
| 1514 | ATX-P-3391 | LC Kappa nt | GACATCGTGATGACCCAGTCTCCAGACTCCCTGGCTGTGT |
| | | | CTCTGGGCGAGAGGGCCACCATCAACTGCAAGTCCAGCCA |
| | | | GAGTGTTTTATACAGCTCCAACAATAAGAACTACTTAGCT |
| | | | TGGTACCAGCAGAAACCAGGACAGCCTCCTAAGCTGCTCA |
| | | | TTTACTGGGCATCTAACCGGGAATCCGGGGTCCCTGACCG |
| | | | ATTCAGTGGCTCCGGGTCTGGGACAGATTTCACTCTCACC |
| | | | ATCAGCAGCCTGCAGGCTGAAGATGTGGCAGTTTATTACT |
| | | | GTCAGCAATATTATAGTACTCCGTACACTTTTGGCCAGGG |
| | | | GACCAAGCTGGAGATCAAACGTACGGTAGCTGCCCCTTCA |
| | | | GTTTTTATCTTTCCGCCGTCTGACGAGCAGTTAAAATCCG |
| | | | GGACCGCTTCTGTAGTTTGCCTGCTGAATAATTTTTATCC |
| | | | GCGTGAGGCTAAAGTACAATGGAAAGTCGACAATGCTTTG |
| | | | CAGTCGGGAAATTCACAGGAAAGTGTTACGGAGCAGGATT |
| | | | CTAAAGATTCCACATATTCACTCAGCTCCACCCTTACACT |
| | | | GAGCAAAGCCGACTATGAAAAACATAAAGTTTACGCATGT |
| | | | GAGGTGACGCACCAAGGATTATCCAGTCCGGTCACAAAAT |
| | | | CGTTTAACCGCGGTGAGTGT |
| 1515 | ATX-P-3392 | LC Kappa nt | GACATCGTGATGACCCAGTCTCCAGACTCCCTGGCTGTGT |
| | | | CTCTGGGCGAGAGGGCCACCATCAACTGCAAGTCCAGCCA |
| | | | GAGTGTTTTATACAGCTCCAACAATAAGAACTACTTAGCT |
| | | | TGGTACCAGCAGAAACCAGGACAGCCTCCTAAGCTGCTCA |
| | | | TTTACTGGGCATCTAACCGGGAATCCGGGGTCCCTGACCG |
| | | | ATTCAGTGGCTCCGGGTCTGGGACAGATTTCACTCTCACC |
| | | | ATCAGCAGCCTGCAGGCTGAAGATGTGGCAGTTTATTACT |
| | | | GTCAGCAATATTATAGTACTCCGTACACTTTTGGCCAGGG |
| | | | GACCAAGCTGGAGATCAAACGTACGGTAGCTGCCCCTTCA |
| | | | GTTTTTATCTTTCCGCCGTCTGACGAGCAGTTAAAATCCG |
| | | | GGACCGCTTCTGTAGTTTGCCTGCTGAATAATTTTTATCC |
| | | | GCGTGAGGCTAAAGTACAATGGAAAGTCGACAATGCTTTG |
| | | | CAGTCGGGAAATTCACAGGAAAGTGTTACGGAGCAGGATT |
| | | | CTAAAGATTCCACATATTCACTCAGCTCCACCCTTACACT |
| | | | GAGCAAAGCCGACTATGAAAAACATAAAGTTTACGCATGT |
| | | | GAGGTGACGCACCAAGGATTATCCAGTCCGGTCACAAAAT |
| | | | CGTTTAACCGCGGTGAGTGT |
| 1516 | ATX-P-3395 | LC Kappa nt | GACATCCAGATGACCCAGTCTCCTTCCACCCTGTCTGCAT |
| | | | CTGTAGGAGACAGCGTCACCATCACTTGCCGGGCCAGTCA |
| | | | GAATATTATTACCTGGTTGGCTTGGTATCAGCAGAAACCA |
| | | | GGGAAAGCCCCTAACCTCCTGATCTATAAGGCGTCTAGTT |
| | | | TAGAAAGTGGGGTCCCATCAAGGTTCAGCGGCAGTGGATC |
| | | | TGGGACAGAATTCACTCTCACCATCAGCAGCCTGCAGCCT |
| | | | GATGATTTTGCAACTTATTACTGCCAACAGTATAGTAGTT |
| | | | ATTCGTACACTTTTGGCCAGGGGACCAAGCTGGAGATCAA |
| | | | ACGTACGGTAGCTGCCCCTTCAGTTTTTATCTTTCCGCCG |
| | | | TCTGACGAGCAGTTAAAATCCGGGACCGCTTCTGTAGTTT |
| | | | GCCTGCTGAATAATTTTTATCCGCGTGAGGCTAAAGTACA |
| | | | ATGGAAAGTCGACAATGCTTTGCAGTCGGGAAATTCACAG |
| | | | GAAAGTGTTACGGAGCAGGATTCTAAAGATTCCACATATT |
| | | | CACTCAGCTCCACCCTTACACTGAGCAAAGCCGACTATGA |
| | | | AAAACATAAAGTTTACGCATGTGAGGTGACGCACCAAGGA |
| | | | TTATCCAGTCCGGTCACAAAATCGTTTAACCGCGGTGAGT |
| | | | GT |
| 1517 | ATX-P-3396 | LC Kappa nt | GACATCCAGATGACCCAGTCTCCTTCCACCCTGTCTGCAT |
| | | | CTGTAGGAGACAGCGTCACCATCACTTGCCGGGCCAGTCA |
| | | | GAATATTATTACCTGGTTGGCTTGGTATCAGCAGAAACCA |
| | | | GGGAAAGCCCCTAACCTCCTGATCTATAAGGCGTCTAGTT |
| | | | TAGAAAGTGGGGTCCCATCAAGGTTCAGCGGCAGTGGATC |
| | | | TGGGACAGAATTCACTCTCACCATCAGCAGCCTGCAGCCT |
| | | | GATGATTTTGCAACTTATTACTGCCAACAGTATAGTAGTT |
| | | | ATTCGTACACTTTTGGCCAGGGGACCAAGCTGGAGATCAA |
| | | | ACGTACGGTAGCTGCCCCTTCAGTTTTTATCTTTCCGCCG |
| | | | TCTGACGAGCAGTTAAAATCCGGGACCGCTTCTGTAGTTT |
| | | | GCCTGCTGAATAATTTTTATCCGCGTGAGGCTAAAGTACA |
| | | | ATGGAAAGTCGACAATGCTTTGCAGTCGGGAAATTCACAG |
| | | | GAAAGTGTTACGGAGCAGGATTCTAAAGATTCCACATATT |
| | | | CACTCAGCTCCACCCTTACACTGAGCAAAGCCGACTATGA |
| | | | AAAACATAAAGTTTACGCATGTGAGGTGACGCACCAAGGA |
| | | | TTATCCAGTCCGGTCACAAAATCGTTTAACCGCGGTGAGT |
| | | | GT |
| 1518 | ATX-P-3397 | LC Kappa nt | GACATCCAGATGACCCAGTCTCCTTCCACCCTGTCTGCAT |
| | | | CTGTAGGAGACAGCGTCACCATCACTTGCCGGGCCAGTCA |
| | | | GAATATTATTACCTGGTTGGCTTGGTATCAGCAGAAACCA |
| | | | GGGAAAGCCCCTAACCTCCTGATCTATAAGGCGTCTAGTT |
| | | | TAGAAAGTGGGGTCCCATCAAGGTTCAGCGGCAGTGGATC |
| | | | TGGGACAGAATTCACTCTCACCATCAGCAGCCTGCAGCCT |
| | | | GATGATTTTGCAACTTATTACTGCCAACAGTATAGTAGTT |
| | | | ATTCGTACACTTTTGGCCAGGGGACCAAGCTGGAGATCAA |
| | | | ACGTACGGTAGCTGCCCCTTCAGTTTTTATCTTTCCGCCG |
| | | | TCTGACGAGCAGTTAAAATCCGGGACCGCTTCTGTAGTTT |
| | | | GCCTGCTGAATAATTTTTATCCGCGTGAGGCTAAAGTACA |
| | | | ATGGAAAGTCGACAATGCTTTGCAGTCGGGAAATTCACAG |
| | | | GAAAGTGTTACGGAGCAGGATTCTAAAGATTCCACATATT |
| | | | CACTCAGCTCCACCCTTACACTGAGCAAAGCCGACTATGA |
| | | | AAAACATAAAGTTTACGCATGTGAGGTGACGCACCAAGGA |
| | | | TTATCCAGTCCGGTCACAAAATCGTTTAACCGCGGTGAGT |
| | | | GT |
| 1519 | ATX-P-3405 | LC Kappa nt | GACATCCAGATGACCCAGTCTCCTTCCACCCTGTCTGCAT |
| | | | CTGTAGGAGACAGCGTCACCATCACTTGCCGGGCCAGTCA |
| | | | GAATATTATTACCTGGTTGGCTTGGTATCAGCAGAAACCA |
| | | | GGGAAAGCCCCTAACCTCCTGATCTATAAGGCGTCTAGTT |
| | | | TAGAAAGTGGGGTCCCATCAAGGTTCAGCGGCAGTGGATC |
| | | | TGGGACAGAATTCACTCTCACCATCAGCAGCCTGCAGCCT |
| | | | GATGATTTTGCAACTTATTACTGCCAACAGTATAGTAGTT |
| | | | ATTCGTACACTTTTGGCCAGGGGACCAAGCTGGAGATCAA |
| | | | ACGTACGGTAGCTGCCCCTTCAGTTTTTATCTTTCCGCCG |
| | | | TCTGACGAGCAGTTAAAATCCGGGACCGCTTCTGTAGTTT |
| | | | GCCTGCTGAATAATTTTTATCCGCGTGAGGCTAAAGTACA |
| | | | ATGGAAAGTCGACAATGCTTTGCAGTCGGGAAATTCACAG |
| | | | GAAAGTGTTACGGAGCAGGATTCTAAAGATTCCACATATT |
| | | | CACTCAGCTCCACCCTTACACTGAGCAAAGCCGACTATGA |
| | | | AAAACATAAAGTTTACGCATGTGAGGTGACGCACCAAGGA |
| | | | TTATCCAGTCCGGTCACAAAATCGTTTAACCGCGGTGAGT |
| | | | GT |
| 1520 | ATX-P-3406 | LC Kappa nt | GACATCCAGATGACCCAGTCTCCTTCCACCCTGTCTGCAT |
| | | | CTGTAGGAGACAGCGTCACCATCACTTGCCGGGCCAGTCA |
| | | | GAATATTATTACCTGGTTGGCTTGGTATCAGCAGAAACCA |
| | | | GGGAAAGCCCCTAACCTCCTGATCTATAAGGCGTCTAGTT |
| | | | TAGAAAGTGGGGTCCCATCAAGGTTCAGCGGCAGTGGATC |
| | | | TGGGACAGAATTCACTCTCACCATCAGCAGCCTGCAGCCT |
| | | | GATGATTTTGCAACTTATTACTGCCAACAGTATAGTAGTT |
| | | | ATTCGTACACTTTTGGCCAGGGGACCAAGCTGGAGATCAA |
| | | | ACGTACGGTAGCTGCCCCTTCAGTTTTTATCTTTCCGCCG |
| | | | TCTGACGAGCAGTTAAAATCCGGGACCGCTTCTGTAGTTT |
| | | | GCCTGCTGAATAATTTTTATCCGCGTGAGGCTAAAGTACA |
| | | | ATGGAAAGTCGACAATGCTTTGCAGTCGGGAAATTCACAG |
| | | | GAAAGTGTTACGGAGCAGGATTCTAAAGATTCCACATATT |
| | | | CACTCAGCTCCACCCTTACACTGAGCAAAGCCGACTATGA |
| | | | AAAACATAAAGTTTACGCATGTGAGGTGACGCACCAAGGA |
| | | | TTATCCAGTCCGGTCACAAAATCGTTTAACCGCGGTGAGT |
| | | | GT |
| 1521 | ATX-P-3407 | LC Kappa nt | GACATCCAGATGACCCAGTCTCCTTCCACCCTGTCTGCAT |
| | | | CTGTAGGAGACAGCGTCACCATCACTTGCCGGGCCAGTCA |
| | | | GAATATTATTACCTGGTTGGCTTGGTATCAGCAGAAACCA |
| | | | GGGAAAGCCCCTAACCTCCTGATCTATAAGGCGTCTAGTT |
| | | | TAGAAAGTGGGGTCCCATCAAGGTTCAGCGGCAGTGGATC |
| | | | TGGGACAGAATTCACTCTCACCATCAGCAGCCTGCAGCCT |
| | | | GATGATTTTGCAACTTATTACTGCCAACAGTATAGTAGTT |
| | | | ATTCGTACACTTTTGGCCAGGGGACCAAGCTGGAGATCAA |
| | | | ACGTACGGTAGCTGCCCCTTCAGTTTTTATCTTTCCGCCG |
| | | | TCTGACGAGCAGTTAAAATCCGGGACCGCTTCTGTAGTTT |
| | | | GCCTGCTGAATAATTTTTATCCGCGTGAGGCTAAAGTACA |
| | | | ATGGAAAGTCGACAATGCTTTGCAGTCGGGAAATTCACAG |
| | | | GAAAGTGTTACGGAGCAGGATTCTAAAGATTCCACATATT |
| | | | CACTCAGCTCCACCCTTACACTGAGCAAAGCCGACTATGA |
| | | | AAAACATAAAGTTTACGCATGTGAGGTGACGCACCAAGGA |
| | | | TTATCCAGTCCGGTCACAAAATCGTTTAACCGCGGTGAGT |
| | | | GT |
| 1522 | ATX-P-3408 | LC Kappa nt | GACATCCAGATGACCCAGTCTCCTTCCACCCTGTCTGCAT |
| | | | CTGTAGGAGACAGCGTCACCATCACTTGCCGGGCCAGTCA |
| | | | GAATATTATTACCTGGTTGGCTTGGTATCAGCAGAAACCA |
| | | | GGGAAAGCCCCTAACCTCCTGATCTATAAGGCGTCTAGTT |
| | | | TAGAAAGTGGGGTCCCATCAAGGTTCAGCGGCAGTGGATC |
| | | | TGGGACAGAATTCACTCTCACCATCAGCAGCCTGCAGCCT |
| | | | GATGATTTTGCAACTTATTACTGCCAACAGTATAGTAGTT |
| | | | ATTCGTACACTTTTGGCCAGGGGACCAAGCTGGAGATCAA |
| | | | ACGTACGGTAGCTGCCCCTTCAGTTTTTATCTTTCCGCCG |
| | | | TCTGACGAGCAGTTAAAATCCGGGACCGCTTCTGTAGTTT |
| | | | GCCTGCTGAATAATTTTTATCCGCGTGAGGCTAAAGTACA |
| | | | ATGGAAAGTCGACAATGCTTTGCAGTCGGGAAATTCACAG |
| | | | GAAAGTGTTACGGAGCAGGATTCTAAAGATTCCACATATT |
| | | | CACTCAGCTCCACCCTTACACTGAGCAAAGCCGACTATGA |
| | | | AAAACATAAAGTTTACGCATGTGAGGTGACGCACCAAGGA |
| | | | TTATCCAGTCCGGTCACAAAATCGTTTAACCGCGGTGAGT |
| | | | GT |
| 1523 | ATX-P-3410 | LC Kappa nt | GACATCCAGATGACCCAGTCTCCTTCCACCCTGTCTGCAT |
| | | | CTGTAGGAGACAGCGTCACCATCACTTGCCGGGCCAGTCA |
| | | | GAATATTATTACCTGGTTGGCTTGGTATCAGCAGAAACCA |
| | | | GGGAAAGCCCCTAACCTCCTGATCTATAAGGCGTCTAGTT |
| | | | TAGAAAGTGGGGTCCCATCAAGGTTCAGCGGCAGTGGATC |
| | | | TGGGACAGAATTCACTCTCACCATCAGCAGCCTGCAGCCT |
| | | | GATGATTTTGCAACTTATTACTGCCAACAGTATAGTAGTT |
| | | | ATTCGTACACTTTTGGCCAGGGGACCAAGCTGGAGATCAA |
| | | | ACGTACGGTAGCTGCCCCTTCAGTTTTTATCTTTCCGCCG |
| | | | TCTGACGAGCAGTTAAAATCCGGGACCGCTTCTGTAGTTT |
| | | | GCCTGCTGAATAATTTTTATCCGCGTGAGGCTAAAGTACA |
| | | | ATGGAAAGTCGACAATGCTTTGCAGTCGGGAAATTCACAG |
| | | | GAAAGTGTTACGGAGCAGGATTCTAAAGATTCCACATATT |
| | | | CACTCAGCTCCACCCTTACACTGAGCAAAGCCGACTATGA |
| | | | AAAACATAAAGTTTACGCATGTGAGGTGACGCACCAAGGA |
| | | | TTATCCAGTCCGGTCACAAAATCGTTTAACCGCGGTGAGT |
| | | | GTGGTAGCTGCCCCTTCAGTTTTTATCTTTCCGCCGTCTG |
| | | | ACGAGCAGTTAAAATCCGGGACCGCTTCTGTAGTTTGCCT |
| | | | GCTGAATAATTTTTATCCGCGTGAGGCTAAAGTACAATGG |
| | | | AAAGTCGACAATGCTTTGCAGTCGGGAAATTCACAGGAAA |
| | | | GTGTTACGGAGCAGGATTCTAAAGATTCCACATATTCACT |
| | | | CAGCTCCACCCTTACACTGAGCAAAGCCGACTATGAAAAA |
| | | | CATAAAGTTTACGCATGTGAGGTGACGCACCAAGGATTAT |
| | | | CCAGTCCGGTCACAAAATCGTTTAACCGCGGTGAGTGT |
| 1528 | ATX-P-3421 | LC Kappa nt | GACATCGTGATGACCCAGTCTCCAGACTCCCTGGCTGTGT |
| | | | CTCTGGGCGAGAGGGCCACCATCAACTGCAAGTCCAGCCA |
| | | | GACTGTTTTGTACAGGTCCAACAATAAGAACTACTTAGCT |
| | | | TGGTATCAGCAGAAACCAGGACAGCCTCCTAAGCTGCTCA |
| | | | TTTACTGGGCATCTACCCGGGAATCCGGGGTCCCTGACCG |
| | | | ATTCAGTGGCAGCGGGTCTGGGACAGATTTCACTCTCACC |
| | | | ATCAGCAGCCTGCAGGCTGAAGATGTGGCAGTTTATTACT |
| | | | GTCAGCAATATTATAGTACTCCGTGGACGTTCGGCCAAGG |
| | | | GACCAAGGTGGAAATCAAACGTACGGTAGCTGCCCCTTCA |
| | | | GTTTTTATCTTTCCGCCGTCTGACGAGCAGTTAAAATCCG |
| | | | GGACCGCTTCTGTAGTTTGCCTGCTGAATAATTTTTATCC |
| | | | GCGTGAGGCTAAAGTACAATGGAAAGTCGACAATGCTTTG |
| | | | CAGTCGGGAAATTCACAGGAAAGTGTTACGGAGCAGGATT |
| | | | CTAAAGATTCCACATATTCACTCAGCTCCACCCTTACACT |
| | | | GAGCAAAGCCGACTATGAAAAACATAAAGTTTACGCATGT |
| | | | GAGGTGACGCACCAAGGATTATCCAGTCCGGTCACAAAAT |
| | | | CGTTTAACCGCGGTGAGTGT |
| 1529 | ATX-P-3428 | LC Kappa nt | GCCATCCAGATGACCCAGTCTCCATCCTCCCTGTCTGCTT |
| | | | CTGTAGGAGACAGAGTCACCATCACTTGCCGGGCAAGTCA |
| | | | GGGCATTAGAAATGATTTAGGCTGGTATCAGCAGAATCCC |
| | | | GGGAAAGCCCCTAAGCTCCTGATTTATGCTGCATCCAATT |
| | | | TACAAAGTGGGGTCCCATCAAGGTTCAGCGGCAGTGGATC |
| | | | TGGCACAGATTTCACTCTCACCATCAGCAGCCTGCAGCCT |
| | | | GAAGATTTTGTTACTTATTACTGTCTACAAGATTACAATT |
| | | | GGCCGTGGACGTTCGGCCAAGGGACACGACTGGAGATTAA |
| | | | ACGTACGGTAGCTGCCCCTTCAGTTTTTATCTTTCCGCCG |
| | | | TCTGACGAGCAGTTAAAATCCGGGACCGCTTCTGTAGTTT |
| | | | GCCTGCTGAATAATTTTTATCCGCGTGAGGCTAAAGTACA |
| | | | ATGGAAAGTCGACAATGCTTTGCAGTCGGGAAATTCACAG |
| | | | GAAAGTGTTACGGAGCAGGATTCTAAAGATTCCACATATT |
| | | | CACTCAGCTCCACCCTTACACTGAGCAAAGCCGACTATGA |
| | | | AAAACATAAAGTTTACGCATGTGAGGTGACGCACCAAGGA |
| | | | TTATCCAGTCCGGTCACAAAATCGTTTAACCGCGGTGAGT |
| | | | GT |
| 1530 | ATX-P-3430 | LC Kappa nt | GACATCCAGATGACCCAGTCTCCATCCTCCCTGTCTGCAT |
| | | | CTGTAGGAGACAGAGTCACCATCACTTGCCGGGCAAGTCA |
| | | | GAGCATTAGCAACTATTTAAATTGGTATCAACAGAAACCA |
| | | | GAGAAAGCCCCTAAGTTCCTGATCTATGCTGCATCCAGTT |
| | | | TGCAAAGTGGGGTCCCATCAAGGTTCAGTGGCAGTGGATC |
| | | | TGGGACAGATTTCACTCTCACCATCAGCAGTCTGCAACCT |
| | | | GAAGATTTTGCAACTTACTACTGTCAACAGAGTTACAGTT |
| | | | CCCCGCTCACTTTCGGCGGAGGGACCAAGGTGGAGATCAA |
| | | | ACGTACGGTAGCTGCCCCTTCAGTTTTTATCTTTCCGCCG |
| | | | TCTGACGAGCAGTTAAAATCCGGGACCGCTTCTGTAGTTT |
| | | | GCCTGCTGAATAATTTTTATCCGCGTGAGGCTAAAGTACA |
| | | | ATGGAAAGTCGACAATGCTTTGCAGTCGGGAAATTCACAG |
| | | | GAAAGTGTTACGGAGCAGGATTCTAAAGATTCCACATATT |
| | | | CACTCAGCTCCACCCTTACACTGAGCAAAGCCGACTATGA |
| | | | AAAACATAAAGTTTACGCATGTGAGGTGACGCACCAAGGA |
| | | | TTATCCAGTCCGGTCACAAAATCGTTTAACCGCGGTGAGT |
| | | | GT |
| 1531 | ATX-P-3431 | LC Kappa nt | GAAATTGTGTTGACTCAGTCTCCAGACTTTCAGTCTGTGA |
| | | | CTCCAAAGGAGAAAGTCACCATCACCTGCCGGGCCAGTCA |
| | | | GAGCATTGGTAGTAACTTACACTGGTTCCAGCAGAAACCA |
| | | | GATCAGTCTCCAAAACTCCTCATCAAGTATGCTTCCCAGT |
| | | | CCTTCTCAGGGGTCCCCTCGAGGTTCAGTGGCAGTGGATC |
| | | | TGGGACAGATTTCACCCTCACCATCAATAGCCTGGAAGCT |
| | | | GAAGATGCTGCAATGTATTACTGTCATCAGAGTAGTAGTT |
| | | | TACCTCGGACGTTCGGCCAAGGGACCAAGGTGGAAATCAA |
| | | | ACGTACGGTAGCTGCCCCTTCAGTTTTTATCTTTCCGCCG |
| | | | TCTGACGAGCAGTTAAAATCCGGGACCGCTTCTGTAGTTT |
| | | | GCCTGCTGAATAATTTTTATCCGCGTGAGGCTAAAGTACA |
| | | | ATGGAAAGTCGACAATGCTTTGCAGTCGGGAAATTCACAG |
| | | | GAAAGTGTTACGGAGCAGGATTCTAAAGATTCCACATATT |
| | | | CACTCAGCTCCACCCTTACACTGAGCAAAGCCGACTATGA |
| | | | AAAACATAAAGTTTACGCATGTGAGGTGACGCACCAAGGA |
| | | | TTATCCAGTCCGGTCACAAAATCGTTTAACCGCGGTGAGT |
| | | | GT |
| 1532 | ATX-P-3435 | LC Kappa nt | GCCATCCAGATGACCCAGTCTCCATCCTCCCTGTCTGCAT |
| | | | CTGTAGGAGACAGAGTCACCATCACTTGCCGGGCAAGTCA |
| | | | GGGCATTAGAAATGATTTAGGCTGGTATCAGCAGAAACCA |
| | | | GGGAAAGCCCCTAAGCTCCTGATCTATGCTGCATCCAGTT |
| | | | TACAAAGTGGGGTCCCATCAAGGTTCAGCGGCAGTGGATC |
| | | | TGGCACAGATTTCACTCTCACCATCAGCAGCCTGCAGCCT |
| | | | GAAGATTTTGCATCTTATTACTGTCTACAAGATTACAATT |
| | | | GGCCGTACACTTTTGGCCAGGGGACCAAGCTGGAGATCAA |
| | | | ACGTACGGTAGCTGCCCCTTCAGTTTTTATCTTTCCGCCG |
| | | | TCTGACGAGCAGTTAAAATCCGGGACCGCTTCTGTAGTTT |
| | | | GCCTGCTGAATAATTTTTATCCGCGTGAGGCTAAAGTACA |
| | | | ATGGAAAGTCGACAATGCTTTGCAGTCGGGAAATTCACAG |
| | | | GAAAGTGTTACGGAGCAGGATTCTAAAGATTCCACATATT |
| | | | CACTCAGCTCCACCCTTACACTGAGCAAAGCCGACTATGA |
| | | | AAAACATAAAGTTTACGCATGTGAGGTGACGCACCAAGGA |
| | | | TTATCCAGTCCGGTCACAAAATCGTTTAACCGCGGTGAGT |
| | | | GT |
| 1533 | ATX-P-3436 | LC Kappa nt | GAAATTGTGTTGACGCAGTCTCCAGGCACCCTGTCTTTGT |
| | | | CTCCAGGGGAAAGAGCCACCCTCTCCTGCAGGGCCAGTCA |
| | | | GAGTGTTAGAAGCAGCTACTTTGCCTGGTACCAGCAGAAA |
| | | | CCTGGCCAGGCTCCCAGGCTCCTCATCTATGGTGCATCCA |
| | | | GCAGGGCCACTGGCATCCCAGACAGGTTCAGTGGCAGTGG |
| | | | GTCTGGGACAGACTTCACTCTCACCATCAGCAGACTGGAG |
| | | | CCTGAAGATTTTGCAGTGTATTACTGTCAGCAGTATGGTA |
| | | | GCTCACCTCGGACGTTCGGCCAAGGGACCAAGGTGGAAAT |
| | | | CAAACGTACGGTAGCTGCCCCTTCAGTTTTTATCTTTCCG |
| | | | CCGTCTGACGAGCAGTTAAAATCCGGGACCGCTTCTGTAG |
| | | | TTTGCCTGCTGAATAATTTTTATCCGCGTGAGGCTAAAGT |
| | | | ACAATGGAAAGTCGACAATGCTTTGCAGTCGGGAAATTCA |
| | | | CAGGAAAGTGTTACGGAGCAGGATTCTAAAGATTCCACAT |
| | | | ATTCACTCAGCTCCACCCTTACACTGAGCAAAGCCGACTA |
| | | | TGAAAAACATAAAGTTTACGCATGTGAGGTGACGCACCAA |
| | | | GGATTATCCAGTCCGGTCACAAAATCGTTTAACCGCGGTG |
| | | | AGTGT |
| 1534 | ATX-P-3437 | LC Kappa nt | GACATCGTGATGACCCAGTCTCCAGACTCCCTGGCTGTGT |
| | | | CTCTGGGCGAGAGGGCCACCATCAACTGCAAGTCCAGCCA |
| | | | GAGTGTTTTATACAGCTCCAACAATAAGAACTACTTAGCT |
| | | | TGGTACCAGCAGAAACCAGGACAGCCTCCTAAGCTGCTCA |
| | | | TTTACTGGGCATCTACCCGGGAATCCGGGGTCCCTGACCG |
| | | | ATTCAGTGGCAGCGGGTCTGGGACAGATTTCACTCTCACC |
| | | | ATCAGCAGCCTGCAGGCTGAAGATGTGGCAGTTTATTACT |
| | | | GTCAGCAATATTTTGGTACTCCTCGGACGTTCGGCCAAGG |
| | | | GACCAAGGTGGAAATCAAACGTACGGTAGCTGCCCCTTCA |
| | | | GTTTTTATCTTTCCGCCGTCTGACGAGCAGTTAAAATCCG |
| | | | GGACCGCTTCTGTAGTTTGCCTGCTGAATAATTTTTATCC |
| | | | GCGTGAGGCTAAAGTACAATGGAAAGTCGACAATGCTTTG |
| | | | CAGTCGGGAAATTCACAGGAAAGTGTTACGGAGCAGGATT |
| | | | CTAAAGATTCCACATATTCACTCAGCTCCACCCTTACACT |
| | | | GAGCAAAGCCGACTATGAAAAACATAAAGTTTACGCATGT |
| | | | GAGGTGACGCACCAAGGATTATCCAGTCCGGTCACAAAAT |
| | | | CGTTTAACCGCGGTGAGTGT |
| 1535 | ATX-P-3440 | LC Kappa nt | GAAATTGTGTTGACACAGTCTCCAGCCACCCTGTCTTTGT |
| | | | CTCCAGGGGAAAGAGCCACCCTCTCCTGCAGGGCCAGTCA |
| | | | GAGTGTTAGCAGCTACTTAGCCTGGTACCAACAGAAACCT |
| | | | GGCCAGGCTCCCAGGCTCCTCATCTATGATGCATCCAACA |
| | | | GGGCCACTGGCATCCCAGCCAGGTTCAGTGGCAGTGGGTC |
| | | | TGGGACAGACTTCACTCTCACCATCAGCAGCCTGCAGTCT |
| | | | GAAGATTTTGCAGTTTATTACTGTCAGCAGCGTAGCAATT |
| | | | GGCCGCTCACTTTCGGCGGAGGGACCAAGGTGGAGATCAA |
| | | | ACGTACGGTAGCTGCCCCTTCAGTTTTTATCTTTCCGCCG |
| | | | TCTGACGAGCAGTTAAAATCCGGGACCGCTTCTGTAGTTT |
| | | | GCCTGCTGAATAATTTTTATCCGCGTGAGGCTAAAGTACA |
| | | | ATGGAAAGTCGACAATGCTTTGCAGTCGGGAAATTCACAG |
| | | | GAAAGTGTTACGGAGCAGGATTCTAAAGATTCCACATATT |
| | | | CACTCAGCTCCACCCTTACACTGAGCAAAGCCGACTATGA |
| | | | AAAACATAAAGTTTACGCATGTGAGGTGACGCACCAAGGA |
| | | | TTATCCAGTCCGGTCACAAAATCGTTTAACCGCGGTGAGT |
| | | | GT |
| 1536 | ATX-P-3442 | LC Kappa nt | GACATCCAGATGACCCAGTCTCCATCCTCCCTGTCTGCAT |
| | | | CTGTAGGAGACAGAGTCACCATCACTTGCCGGGCAAGTCA |
| | | | GACCATTAGGAGCTATTTAAATTGGTATCAGCAGAAACCA |
| | | | GGGAAAGCCCCTAAGCTCCTGATCTATGCTGCATCCAGTT |
| | | | TGCAAAGTGGGGTCCCATCAAGGTTCAGTGGCAGTGGATC |
| | | | TGGGACAAATTTCACTCTCACCATCAGCAGTCTGCAACCT |
| | | | GAAGATTTTGCAACTTACTCCTGTCAACAGAGTTACACTA |
| | | | CCCCGCTCACTTTCGGCGGAGGGACCAAGGTGGAGATCAA |
| | | | ACGTACGGTAGCTGCCCCTTCAGTTITTATCTTTCCGCCG |
| | | | TCTGACGAGCAGTTAAAATCCGGGACCGCTTCTGTAGTTT |
| | | | GCCTGCTGAATAATTTTTATCCGCGTGAGGCTAAAGTACA |
| | | | ATGGAAAGTCGACAATGCTTTGCAGTCGGGAAATTCACAG |
| | | | GAAAGTGTTACGGAGCAGGATTCTAAAGATTCCACATATT |
| | | | CACTCAGCTCCACCCTTACACTGAGCAAAGCCGACTATGA |
| | | | AAAACATAAAGTTTACGCATGTGAGGTGACGCACCAAGGA |
| | | | TTATCCAGTCCGGTCACAAAATCGTTTAACCGCGGTGAGT |
| | | | GT |
| 1537 | ATX-P-3444 | LC Kappa nt | GAAATTGTGTTGACGCAGTCTCCAGGCACCCTGTCTTTGT |
| | | | CTCCAGGGGAAAGAGCCACCCTCTCCTGCAGGGCCAGTCA |
| | | | GAGTATTAGCAGCAGCTACTTAGCCTGGTACCAGCGGGAA |
| | | | CCTGGCCAGGCTCCCAGGCTCCTCATCTATGGTGCATCCA |
| | | | GCAGGGCCACTGGCATCCCAGACAGGTTCAGTGGCAGTGG |
| | | | GTCTGGGACAGACTTCACTCTCACCATCAGCAGACTGGAG |
| | | | CCTGAAGATTTTGTAGTGTATTACTGTCAACAATATGGTA |
| | | | GCTCACCGATCACCTTCGGCCAAGGGACACGACTGGAGAT |
| | | | TAAACGTACGGTAGCTGCCCCTTCAGTTTTTATCTTTCCG |
| | | | CCGTCTGACGAGCAGTTAAAATCCGGGACCGCTTCTGTAG |
| | | | TTTGCCTGCTGAATAATTTTTATCCGCGTGAGGCTAAAGT |
| | | | ACAATGGAAAGTCGACAATGCTTTGCAGTCGGGAAATTCA |
| | | | CAGGAAAGTGTTACGGAGCAGGATTCTAAAGATTCCACAT |
| | | | ATTCACTCAGCTCCACCCTTACACTGAGCAAAGCCGACTA |
| | | | TGAAAAACATAAAGTTTACGCATGTGAGGTGACGCACCAA |
| | | | GGATTATCCAGTCCGGTCACAAAATCGTTTAACCGCGGTG |
| | | | AGTGT |
| 1538 | ATX-P-3447 | LC Kappa nt | GAAATTGTGTTGACGCAGTCTCCAGGCACCCTGTCTTTGT |
| | | | CTCCAGGGGAAAGAGCCACCCTCTCCTGCAGGGCCAGTCA |
| | | | GAGTGTTCGCAGCAGCTACTTAGCCTGGTACCAGCAGAAA |
| | | | CCTGGCCAGGCTCCCAGGCTCCTCATCTATGGTGCATCCA |
| | | | GCAGGGCCACTGGCATCCCAGACAGGTTCAGTGGCAGTGG |
| | | | GTCTGGGACAGACTTCACTCTCACCTTCAGCAGACTGGAG |
| | | | CCTGAAGATTTTGCAGTGTATTACTGTCAGCAGTATGGTA |
| | | | GCTCACCGTACACTTTTGGCCAGGGGACCAAGCTGGAGAT |
| | | | CAAACGTACGGTAGCTGCCCCTTCAGTTTTTATCTTTCCG |
| | | | CCGTCTGACGAGCAGTTAAAATCCGGGACCGCTTCTGTAG |
| | | | TTTGCCTGCTGAATAATTTTTATCCGCGTGAGGCTAAAGT |
| | | | ACAATGGAAAGTCGACAATGCTTTGCAGTCGGGAAATTCA |
| | | | CAGGAAAGTGTTACGGAGCAGGATTCTAAAGATTCCACAT |
| | | | ATTCACTCAGCTCCACCCTTACACTGAGCAAAGCCGACTA |
| | | | TGAAAAACATAAAGTTTACGCATGTGAGGTGACGCACCAA |
| | | | GGATTATCCAGTCCGGTCACAAAATCGTTTAACCGCGGTG |
| | | | AGTGT |
| 1539 | ATX-P-3448 | LC Kappa nt | GACATCCAGATGACCCAGTCTCCATCCTCCCTGTCTGCAT |
| | | | CTGTAGGAGACAGAGTCACCATCACTTGCCAGGCGAGTCA |
| | | | GGACATTAGCAACTATTTAAATTGGTATCAGCAGAAACCA |
| | | | GGGAAAGCCCCTAAGCTCCTGATCTACGATGCATCCAATT |
| | | | TGGAAACAGGGGTCCCATCAAGGTTCAGTGGAAGTGGATC |
| | | | TGGGACAGATTTTACTTTCACCATCAGCAGCCTGCAGCCT |
| | | | GAAGATTTTGCAACTTACTATTGTCAACAGGCTAACAGTT |
| | | | TCCCGCTCACTTTCGGCGGAGGGACCAAGGTGGAGATCAA |
| | | | ACGTACGGTAGCTGCCCCTTCAGTTTTTATCTTTCCGCCG |
| | | | TCTGACGAGCAGTTAAAATCCGGGACCGCTTCTGTAGTTT |
| | | | GCCTGCTGAATAATTTTTATCCGCGTGAGGCTAAAGTACA |
| | | | ATGGAAAGTCGACAATGCTTTGCAGTCGGGAAATTCACAG |
| | | | GAAAGTGTTACGGAGCAGGATTCTAAAGATTCCACATATT |
| | | | CACTCAGCTCCACCCTTACACTGAGCAAAGCCGACTATGA |
| | | | AAAACATAAAGTTTACGCATGTGAGGTGACGCACCAAGGA |
| | | | TTATCCAGTCCGGTCACAAAATCGTTTAACCGCGGTGAGT |
| | | | GT |
| 1540 | ATX-P-3449 | LC Kappa nt | GAAATTGTGTTGACGCAGTCTCCAGGCACCCTGTCTTTGT |
| | | | CTCCAGGGGAAAGAGCCACCCTCTCCTGCAGGGCCAGTCA |
| | | | GAGTGTTAGCAGCAGCTACTTAGCCTGGTACCAGCAGAAA |
| | | | CCTGGCCAGGCTCCCAGGCTCCTCATCTATGGTGCATCCA |
| | | | GCAGGGCCACTGGCATCCCAGACAGGTTCAGTGGCAGTGG |
| | | | GTCTGGGACAGACTTCACTCTCACCATCAGCAGACTGGAG |
| | | | CCTGAAGATTTTGCAGTGTATTACTGTCAGCAGTATGGTA |
| | | | GCTCACCATTCACTTTCGGCCCTGGGACCAAAGTGGATAT |
| | | | CAAACGTACGGTAGCTGCCCCTTCAGTTTTTATCTTTCCG |
| | | | CCGTCTGACGAGCAGTTAAAATCCGGGACCGCTTCTGTAG |
| | | | TTTGCCTGCTGAATAATTTTTATCCGCGTGAGGCTAAAGT |
| | | | ACAATGGAAAGTCGACAATGCTTTGCAGTCGGGAAATTCA |
| | | | CAGGAAAGTGTTACGGAGCAGGATTCTAAAGATTCCACAT |
| | | | ATTCACTCAGCTCCACCCTTACACTGAGCAAAGCCGACTA |
| | | | TGAAAAACATAAAGTTTACGCATGTGAGGTGACGCACCAA |
| | | | GGATTATCCAGTCCGGTCACAAAATCGTTTAACCGCGGTG |
| | | | AGTGT |
| 1541 | ATX-P-3450 | LC Kappa nt | GACATCGTGATGACCCAGTCTCCAGACTCCCTGGCTGTGT |
| | | | CTCTGGGCGAGAGGGCCACCATCAACTGCAAGTCCAGCCA |
| | | | GAGTGTTTTATACAGCTCCAACAATAAGAACTACTTAGCT |
| | | | TGGTACCAGCAGAAACCAGGACAGCCTCCTAAGCTGCTCA |
| | | | TTTACTGGGCATCTACCCGGGAATCCGGGGTCCCTGACCG |
| | | | ATTCAGTGGCAGCGGGTCTGGGACAGATTTCACTCTCACC |
| | | | ATCAGCAGCCTGCAGGCTGAAGATGTGGCAGTTTATTACT |
| | | | GTCAGCAATATTATAGTACTCCGTGGACGTTCGGCCAAGG |
| | | | GACACGACTGGAGATTAAACGTACGGTAGCTGCCCCTTCA |
| | | | GTTTTTATCTTTCCGCCGTCTGACGAGCAGTTAAAATCCG |
| | | | GGACCGCTTCTGTAGTTTGCCTGCTGAATAATTTTTATCC |
| | | | GCGTGAGGCTAAAGTACAATGGAAAGTCGACAATGCTTTG |
| | | | CAGTCGGGAAATTCACAGGAAAGTGTTACGGAGCAGGATT |
| | | | CTAAAGATTCCACATATTCACTCAGCTCCACCCTTACACT |
| | | | GAGCAAAGCCGACTATGAAAAACATAAAGTTTACGCATGT |
| | | | GAGGTGACGCACCAAGGATTATCCAGTCCGGTCACAAAAT |
| | | | CGTTTAACCGCGGTGAGTGT |
| 1542 | ATX-P-3451 | LC Kappa nt | GACATCCAGATGACCCAGTCTCCATCCTCCCTGTCTGCAT |
| | | | CTGTAGGAGACAGAGTCACCATCACTTGCCGGGCGAGTCA |
| | | | GGACATTAGCAACTATTTAAATTGGTATCAGCAGAAACCA |
| | | | GGGAAAGCCCCTAAGCTCCTGATCTATGCTGCATCCAGTT |
| | | | TGGAAAGTGGGGTCCCATCAAGGTTCAGTGGCAGTGGATC |
| | | | TGGGACAGATTTCACTCTCACCATCAGCAGTCTGCAACCT |
| | | | GAAGATTTTGCAACTTACTACTGTCAACAGAGTTACAGTA |
| | | | CCCCTACTTTCGGCGGAGGGACCAAGGTGGAGATCAAACG |
| | | | TACGGTAGCTGCCCCTTCAGTTTTTATCTTTCCGCCGTCT |
| | | | GACGAGCAGTTAAAATCCGGGACCGCTTCTGTAGTTTGCC |
| | | | TGCTGAATAATTTTTATCCGCGTGAGGCTAAAGTACAATG |
| | | | GAAAGTCGACAATGCTTTGCAGTCGGGAAATTCACAGGAA |
| | | | AGTGTTACGGAGCAGGATTCTAAAGATTCCACATATTCAC |
| | | | TCAGCTCCACCCTTACACTGAGCAAAGCCGACTATGAAAA |
| | | | ACATAAAGTTTACGCATGTGAGGTGACGCACCAAGGATTA |
| | | | TCCAGTCCGGTCACAAAATCGTTTAACCGCGGTGAGTGT |
| 1543 | ATX-P-3453 | LC Kappa nt | GACATCGTGATGACCCAGTCTCCAGACTCCCTGGCTGTGT |
| | | | CTCTGGGCGAGAGGGCCACCATCAACTGCAAGTCCAGCCA |
| | | | GAGTGTTTTATACAGGTCCAACAATAAGAACTACTTAGCT |
| | | | TGGTACCAGCAGAAACCAGGCCAGCCTCCTAAACTGCTCA |
| | | | TTTACTGGGCATCTACCCGGGAATCCGGGGTCCCTGACCG |
| | | | ATTCAGTGGCAGCGGGTCTGGGACAGATTTCACTCTCACC |
| | | | ATCAGCAGCCTGCAGGCTGAAGATGTGGCAGTTTATTACT |
| | | | GTCAGCAATATTATGGTACTCCTCGGACGTTCGGCCAAGG |
| | | | GACCAAGGTGGAAATCAAACGTACGGTAGCTGCCCCTTCA |
| | | | GTTTTTATCTTTCCGCCGTCTGACGAGCAGTTAAAATCCG |
| | | | GGACCGCTTCTGTAGTTTGCCTGCTGAATAATTTTTATCC |
| | | | GCGTGAGGCTAAAGTACAATGGAAAGTCGACAATGCTTTG |
| | | | CAGTCGGGAAATTCACAGGAAAGTGTTACGGAGCAGGATT |
| | | | CTAAAGATTCCACATATTCACTCAGCTCCACCCTTACACT |
| | | | GAGCAAAGCCGACTATGAAAAACATAAAGTTTACGCATGT |
| | | | GAGGTGACGCACCAAGGATTATCCAGTCCGGTCACAAAAT |
| | | | CGTTTAACCGCGGTGAGTGT |
| 1544 | ATX-P-3454 | LC Kappa nt | GACATCCAGATGACCCAGTCTCCATCCTCCCTGTCTGCAT |
| | | | CTGTAGGAGACAGAGTCACCATCACTTGCCAGGCGAGTCA |
| | | | GGACATTAAGAACTGTTTAAATTGGTATCAGCAGAAACCA |
| | | | GGGAAAGCCCCTAAGCTCCTGATCTACGATGCATCCAATT |
| | | | TGGAAACAGGGGTCCCATCAAGGTTCAGTGGAAGTGGATC |
| | | | TGGGACAGATTTTACTTTCACCATCAGCAGCCTGCAGCCT |
| | | | GAAGATATTGCAACATATTACTGTCAACAGTTTGATAATC |
| | | | TCCCTCTCACTTTCGGCGGAGGGACCAAGGTGGAGATCAA |
| | | | ACGTACGGTAGCTGCCCCTTCAGTTTTTATCTTTCCGCCG |
| | | | TCTGACGAGCAGTTAAAATCCGGGACCGCTTCTGTAGTTT |
| | | | GCCTGCTGAATAATTTTTATCCGCGTGAGGCTAAAGTACA |
| | | | ATGGAAAGTCGACAATGCTTTGCAGTCGGGAAATTCACAG |
| | | | GAAAGTGTTACGGAGCAGGATTCTAAAGATTCCACATATT |
| | | | CACTCAGCTCCACCCTTACACTGAGCAAAGCCGACTATGA |
| | | | AAAACATAAAGTTTACGCATGTGAGGTGACGCACCAAGGA |
| | | | TTATCCAGTCCGGTCACAAAATCGTTTAACCGCGGTGAGT |
| | | | GT |
| 1545 | ATX-P-3455 | LC Kappa nt | GACATCGTGATGACCCAGTCTCCAGACTCCCTGGCTGTGT |
| | | | CTCTGGGCGAGAGGGCCACCATCAACTGCAAGTCCAGCCA |
| | | | GACTATTTTATACAGGTCCAACATTAAGAACTACTTAGCT |
| | | | TGGTACCAGCAGAAACCAGGACAGCCTCCTAAACTGCTCA |
| | | | TTTCCTGGGCATCTACCCGGGAATCCGGGGTCCCTGACCG |
| | | | ATTCAGTGGCAGCGGGTCTGGGACAGATTTCACTCTCACC |
| | | | ATCAGCAGCCTGCAGGCTGAAGATGTGGCAGTTTATTACT |
| | | | GTCAGCAATATTATAGTACTCGGACGTTCGGCCAGGGGAC |
| | | | CAAGCTGGAGATCAAACGTACGGTAGCTGCCCCTTCAGTT |
| | | | TTTATCTTTCCGCCGTCTGACGAGCAGTTAAAATCCGGGA |
| | | | CCGCTTCTGTAGTTTGCCTGCTGAATAATTTTTATCCGCG |
| | | | TGAGGCTAAAGTACAATGGAAAGTCGACAATGCTTTGCAG |
| | | | TCGGGAAATTCACAGGAAAGTGTTACGGAGCAGGATTCTA |
| | | | AAGATTCCACATATTCACTCAGCTCCACCCTTACACTGAG |
| | | | CAAAGCCGACTATGAAAAACATAAAGTTTACGCATGTGAG |
| | | | GTGACGCACCAAGGATTATCCAGTCCGGTCACAAAATCGT |
| | | | TTAACCGCGGTGAGTGT |
| 1546 | ATX-P-3456 | LC Kappa nt | GACATCGTGATGACCCAGTCTCCAGACTCCCTGGCTGTGT |
| | | | CTCTGGGCGAGAGGGCCACCATCAACTGCAAGTCCAGCCA |
| | | | GAGTGTTTTATACAGCTCCAACAATAAGAACTACTTAGCT |
| | | | TGGTACCAGCAGAAACCAGGACAGCCTCCTAAGCTGCTCA |
| | | | TTTACTGGGCATCTACCCGGGAATCCGGGGTCCCTGACCG |
| | | | ATTCAGTGGCAGCGGGTCTGGGACAGATTTCACTCTCACC |
| | | | ATCAGCAGCCTGCAGGCTGAAGATGTGGCAGTTTATTACT |
| | | | GTCAGCAATATTATAGTACTCCTCGGACGTTCGGCCAAGG |
| | | | GACCAAGGTGGAAATCAAACGTACGGTAGCTGCCCCTTCA |
| | | | GTTTTTATCTTTCCGCCGTCTGACGAGCAGTTAAAATCCG |
| | | | GGACCGCTTCTGTAGTTTGCCTGCTGAATAATTTTTATCC |
| | | | GCGTGAGGCTAAAGTACAATGGAAAGTCGACAATGCTTTG |
| | | | CAGTCGGGAAATTCACAGGAAAGTGTTACGGAGCAGGATT |
| | | | CTAAAGATTCCACATATTCACTCAGCTCCACCCTTACACT |
| | | | GAGCAAAGCCGACTATGAAAAACATAAAGTTTACGCATGT |
| | | | GAGGTGACGCACCAAGGATTATCCAGTCCGGTCACAAAAT |
| | | | CGTTTAACCGCGGTGAGTGT |
| 1547 | ATX-P-3458 | LC Kappa nt | GACATCCAGATGACCCAGTCTCCTTCCACCCTGTCTGCAT |
| | | | CTGTAGGAGACAGAGTCACTATCACTTGTCGGGCGAGTCA |
| | | | GGGTATTAGCAGCTGGTTAGCCTGGTATCAGCAGAAACCA |
| | | | GGGAAAGCCCCTAAACTCCTGATCTATGCTGCATCCAGTT |
| | | | TGCAGAGTGGGGTCCCATCAAGGTTCAGCGGCAGTGGATC |
| | | | TGGGACAGATTTCACTCTCACCATCAGCAGCCTGCAGCCT |
| | | | GAAGATTTTGCAACTTACTATTGTCAACAGGCTAACAGTT |
| | | | TCCCTCTCACTTTCGGCGGAGGGACCAAGGTGGAGATCAA |
| | | | ACGTACGGTAGCTGCCCCTTCAGTTITTATCTTTCCGCCG |
| | | | TCTGACGAGCAGTTAAAATCCGGGACCGCTTCTGTAGTTT |
| | | | GCCTGCTGAATAATTTTTATCCGCGTGAGGCTAAAGTACA |
| | | | ATGGAAAGTCGACAATGCTTTGCAGTCGGGAAATTCACAG |
| | | | GAAAGTGTTACGGAGCAGGATTCTAAAGATTCCACATATT |
| | | | CACTCAGCTCCACCCTTACACTGAGCAAAGCCGACTATGA |
| | | | AAAACATAAAGTTTACGCATGTGAGGTGACGCACCAAGGA |
| | | | TTATCCAGTCCGGTCACAAAATCGTTTAACCGCGGTGAGT |
| | | | GT |
| 1548 | ATX-P-3459 | LC Kappa nt | GACATCGTGATGACCCAGTCTCCAGACTCCCTGGCTGTGT |
| | | | CTCTGGGCGAGAGGGCCACCATCAACTGCAAGTCCAGCCA |
| | | | GAGTGTTTTATACAGCTCCAACAATAAGAACTACTTAGCT |
| | | | TGGTACCAGCAGAAACCAGGACAGCCTCCTAAGCTGCTCA |
| | | | TTTACTGGGCATCTACCCGGGAATCCGGGGTCCCTGACCG |
| | | | ATTCAGTGGCAGCGGGTCTGGGACAGATTTCACTCTCACC |
| | | | ATCAGCAGCCTGCAGGCTGAAGATGTGGCAGTTTATTACT |
| | | | GTCAGCAATATTATAGTACTCCTCCGACGTTCGGCCAAGG |
| | | | GACCAAGGTGGAAATCAAACGTACGGTAGCTGCCCCTTCA |
| | | | GTTTTTATCTTTCCGCCGTCTGACGAGCAGTTAAAATCCG |
| | | | GGACCGCTTCTGTAGTTTGCCTGCTGAATAATTTTTATCC |
| | | | GCGTGAGGCTAAAGTACAATGGAAAGTCGACAATGCTTTG |
| | | | CAGTCGGGAAATTCACAGGAAAGTGTTACGGAGCAGGATT |
| | | | CTAAAGATTCCACATATTCACTCAGCTCCACCCTTACACT |
| | | | GAGCAAAGCCGACTATGAAAAACATAAAGTTTACGCATGT |
| | | | GAGGTGACGCACCAAGGATTATCCAGTCCGGTCACAAAAT |
| | | | CGTTTAACCGCGGTGAGTGT |
| 1549 | ATX-P-3462 | LC Kappa nt | GACATCCAGATGACCCAGTCTCCATCCTCCCTGTCTGCAT |
| | | | CTGTAGGAGACAGAGTCACCATCACTTGCCGGGCAAGTCA |
| | | | GAGCATTAGCAGCTATTTAAATTGGTATCAGCAGAAACCA |
| | | | GGGAAAGCCCCTAAGCTCCTGATCTATGCTGCATCCAGTT |
| | | | TGCAAAGTGGGGTCCCATCAAGGTTCAGTGGCAGTGGATC |
| | | | TGGGACAGATTTCACTCTCACCATCAGCAGTCTGCAACCT |
| | | | GAAGATTTTGCAACTTACTACTGTCAACAGAGTTACAGTA |
| | | | CCCCGTACACTTTTGGCCAGGGGACCAAGCTGGAGATCAA |
| | | | ACGTACGGTAGCTGCCCCTTCAGTTTTTATCTTTCCGCCG |
| | | | TCTGACGAGCAGTTAAAATCCGGGACCGCTTCTGTAGTTT |
| | | | GCCTGCTGAATAATTTTTATCCGCGTGAGGCTAAAGTACA |
| | | | ATGGAAAGTCGACAATGCTTTGCAGTCGGGAAATTCACAG |
| | | | GAAAGTGTTACGGAGCAGGATTCTAAAGATTCCACATATT |
| | | | CACTCAGCTCCACCCTTACACTGAGCAAAGCCGACTATGA |
| | | | AAAACATAAAGTTTACGCATGTGAGGTGACGCACCAAGGA |
| | | | TTATCCAGTCCGGTCACAAAATCGTTTAACCGCGGTGAGT |
| | | | GT |
| 1550 | ATX-P-3463 | LC Kappa nt | GACATCGTGATGACCCAGTCTCCAGACTCCCTGGCTGTGT |
| | | | CTCTGGGCGAGAGGGCCACCATCAACTGCAAGTCCAGCCA |
| | | | GAGTGTTTTATACAGCTCCAACAATAAGAACTACTTAGCT |
| | | | TGGTACCAGCAGAAACCAGGACAGCCTCCTAAGCTGCTCA |
| | | | TTTACTGGGCATCTACCCGGGAATCCGGGGTCCCTGACCG |
| | | | ATTCAGTGGCAGCGGGTCTGGGACAGATTTCACTCTCACC |
| | | | ATCAGCAGCCTGCAGGCTGAAGATGTGGCAGTTTATTACT |
| | | | GTCAGCAATTTTATGATACTCCTCGGACGTTCGGCCAAGG |
| | | | GACCAAGGTGGAAATCAAACGTACGGTAGCTGCCCCTTCA |
| | | | GTTTTTATCTTTCCGCCGTCTGACGAGCAGTTAAAATCCG |
| | | | GGACCGCTTCTGTAGTTTGCCTGCTGAATAATTTTTATCC |
| | | | GCGTGAGGCTAAAGTACAATGGAAAGTCGACAATGCTTTG |
| | | | CAGTCGGGAAATTCACAGGAAAGTGTTACGGAGCAGGATT |
| | | | CTAAAGATTCCACATATTCACTCAGCTCCACCCTTACACT |
| | | | GAGCAAAGCCGACTATGAAAAACATAAAGTTTACGCATGT |
| | | | GAGGTGACGCACCAAGGATTATCCAGTCCGGTCACAAAAT |
| | | | CGTTTAACCGCGGTGAGTGT |
| 1551 | ATX-P-3466 | LC Kappa nt | GACATCCAGATGACCCAGTCTCCATCCTCCCTGTCTGCAT |
| | | | CTGTAGGAGACAGAGTCACCATCACTTGCCGGGCGAGTCA |
| | | | GGGCATTAGCAATTATTTAGCCTGGTATCAGCAGAAACCA |
| | | | GGGAAAGTTCCTAAGCTCCTGATCTATGTTGCATCCACTT |
| | | | TGCAATCAGGGGTCCCATCTCGGTTCAGTGGCAGTGGATC |
| | | | TGGGACAGATTTCACTCTCACCATCAGCAGCCTGCAGCCT |
| | | | GAAGATGTTGCAACTTATTACTGTCAAAATTATATCAGTG |
| | | | CCCCGCTCACTTTCGGCGGAGGGACCAAGGTGGAGATCAA |
| | | | ACGTACGGTAGCTGCCCCTTCAGTTTTTATCTTTCCGCCG |
| | | | TCTGACGAGCAGTTAAAATCCGGGACCGCTTCTGTAGTTT |
| | | | GCCTGCTGAATAATTTTTATCCGCGTGAGGCTAAAGTACA |
| | | | ATGGAAAGTCGACAATGCTTTGCAGTCGGGAAATTCACAG |
| | | | GAAAGTGTTACGGAGCAGGATTCTAAAGATTCCACATATT |
| | | | CACTCAGCTCCACCCTTACACTGAGCAAAGCCGACTATGA |
| | | | AAAACATAAAGTTTACGCATGTGAGGTGACGCACCAAGGA |
| | | | TTATCCAGTCCGGTCACAAAATCGTTTAACCGCGGTGAGT |
| | | | GT |
| 1552 | ATX-P-3467 | LC Kappa nt | GACATCGTGATGACCCAGTCTCCAGACTCCCTGGCTGTGT |
| | | | CTCTGGGCGAGAGGGCCACCATCAACTGCAAGTCCAGCCA |
| | | | GAGTGTTTTATACAGCTCCAACAATAAGAACTACTTAGCT |
| | | | TGGTACCAGCAGAAACCAGGACAGCCTCCTAAGCTGCTCA |
| | | | TTTACTGGGCATCTACCCGGGAATCCGGGGTCCCTGACCG |
| | | | ATTCAGTGGCAGCGGGTCTGGGACAGATTTCACTCTCACC |
| | | | ATCAGCAGCCTGCAGGCTGAAGATGTGGCAGTTTATTACT |
| | | | GTCAGCAATATTATAGTACTCCGTGGACGTTCGGCCAAGG |
| | | | GACCAAGGTGGAAATCAAACGTACGGTAGCTGCCCCTTCA |
| | | | GTTTTTATCTTTCCGCCGTCTGACGAGCAGTTAAAATCCG |
| | | | GGACCGCTTCTGTAGTTTGCCTGCTGAATAATTTTTATCC |
| | | | GCGTGAGGCTAAAGTACAATGGAAAGTCGACAATGCTTTG |
| | | | CAGTCGGGAAATTCACAGGAAAGTGTTACGGAGCAGGATT |
| | | | CTAAAGATTCCACATATTCACTCAGCTCCACCCTTACACT |
| | | | GAGCAAAGCCGACTATGAAAAACATAAAGTTTACGCATGT |
| | | | GAGGTGACGCACCAAGGATTATCCAGTCCGGTCACAAAAT |
| | | | CGTTTAACCGCGGTGAGTGT |
| 1553 | ATX-P-3468 | LC Kappa nt | GAAATTGTGTTGACGCAGTCTCCAGGCACCCTGTCTTTGT |
| | | | CTCCAGGGGAAAGAGCCACCCTCTCCTGCAGGGCCAGTCA |
| | | | GAGTGTTAGCAGCAGCTACTTAGCCTGGTACCAGCAGAAA |
| | | | CCTGGCCAGGCTCCCAGGCTCCTCATCTATGGTGCATCCA |
| | | | GCAGGGCCACTGGCATCCCAGACAGGTTCAGTGGCAGTGG |
| | | | GTCTGGGACAGACTTCACTCTCACCATCAGCAGACTGGAG |
| | | | CCTGAAGATTTTGCAGTGTATTACTGTCAGCAGTATGGTA |
| | | | GCTCACCGTACACTTTTGGCCAGGGGACCAAGCTGGAGAT |
| | | | CAAACGTACGGTAGCTGCCCCTTCAGTTTTTATCTTTCCG |
| | | | CCGTCTGACGAGCAGTTAAAATCCGGGACCGCTTCTGTAG |
| | | | TTTGCCTGCTGAATAATTTTTATCCGCGTGAGGCTAAAGT |
| | | | ACAATGGAAAGTCGACAATGCTTTGCAGTCGGGAAATTCA |
| | | | CAGGAAAGTGTTACGGAGCAGGATTCTAAAGATTCCACAT |
| | | | ATTCACTCAGCTCCACCCTTACACTGAGCAAAGCCGACTA |
| | | | TGAAAAACATAAAGTTTACGCATGTGAGGTGACGCACCAA |
| | | | GGATTATCCAGTCCGGTCACAAAATCGTTTAACCGCGGTG |
| | | | AGTGT |
| 1554 | ATX-P-3469 | LC Kappa nt | GACATCCAGATGACCCAGTCTCCATCCTCCCTGTCTGCAT |
| | | | CTGTAGGAGACAGAGTCAACATCACTTGCCGGGCGAGTCA |
| | | | GGGCATTAGCAATTATTTAGCCTGGTATCAGCAGAAACCA |
| | | | GGGAAAGTTCCTAAGCTCCTGATCTATGCTGCATCCACTT |
| | | | TGCAATCAGGGGTCCCATCTCGTTTCAGTGGCAGTGGATC |
| | | | TGGGACAGATTTCACTCTCACCATCAGCAGCCTGCAGCCT |
| | | | GAAGATGTTGCAAGTTATTTCTGTCAAAAATATATCAGTG |
| | | | CCCCGCTCACTTTCGGCGGAGGGACCAAGGTGGAGATCAA |
| | | | ACGTACGGTAGCTGCCCCTTCAGTTTTTATCTTTCCGCCG |
| | | | TCTGACGAGCAGTTAAAATCCGGGACCGCTTCTGTAGTTT |
| | | | GCCTGCTGAATAATTTTTATCCGCGTGAGGCTAAAGTACA |
| | | | ATGGAAAGTCGACAATGCTTTGCAGTCGGGAAATTCACAG |
| | | | GAAAGTGTTACGGAGCAGGATTCTAAAGATTCCACATATT |
| | | | CACTCAGCTCCACCCTTACACTGAGCAAAGCCGACTATGA |
| | | | AAAACATAAAGTTTACGCATGTGAGGTGACGCACCAAGGA |
| | | | TTATCCAGTCCGGTCACAAAATCGTTTAACCGCGGTGAGT |
| | | | GT |
| 1555 | ATX-P-3470 | LC Kappa nt | GACATCCAGATGACCCAGTCTCCATCCTCCCTGTCTGCAT |
| | | | CTGTAGGAGACAGAGTCACCATCACTTGCCGGGCGAGTCA |
| | | | GGGCATTAGCAATTATTTAGCCTGGTATCAGCAGAAACCA |
| | | | GGGAAAGTTCCTAAGCTCCTGATCTATGCTGCATCCACTT |
| | | | TGCAATCAGGGGTCCCATCTCGGTTCAGTGGCAGTGGATC |
| | | | TGGGACAGATTTCACTCTCACCATCAGCAGCCTGCAGCCT |
| | | | GAAGACGTTGCAAGTTATTACTGTCAAGATTATACCAGTG |
| | | | CCCCGCTCACTTTCGGCGGAGGGACCAAGGTGGAGATCAA |
| | | | ACGTACGGTAGCTGCCCCTTCAGTTTTTATCTTTCCGCCG |
| | | | TCTGACGAGCAGTTAAAATCCGGGACCGCTTCTGTAGTTT |
| | | | GCCTGCTGAATAATTTTTATCCGCGTGAGGCTAAAGTACA |
| | | | ATGGAAAGTCGACAATGCTTTGCAGTCGGGAAATTCACAG |
| | | | GAAAGTGTTACGGAGCAGGATTCTAAAGATTCCACATATT |
| | | | CACTCAGCTCCACCCTTACACTGAGCAAAGCCGACTATGA |
| | | | AAAACATAAAGTTTACGCATGTGAGGTGACGCACCAAGGA |
| | | | TTATCCAGTCCGGTCACAAAATCGTTTAACCGCGGTGAGT |
| | | | GT |
| 1556 | ATX-P-3471 | LC Kappa nt | GAAATTGTGTTGACGCAGTCTCCAGGCACCCTGTCTTTGT |
| | | | CTCCAGGGGAAAGAGCCACCCTCTCCTGCAGGGCCAGTCA |
| | | | GAGTGTTAGTGACAGCTACTTAGCCTGGTACCAGCAGGAA |
| | | | CCTGGCCAGGCGCCCAGGCTCCTCATCTATGGTGCATCCA |
| | | | GCAGGGCCACTGGCATCCCAGACAGGTTCAGTGGCAGTGG |
| | | | GTCTGGGACAGACTTCACTCTCACCATCAGCAGACTGGAG |
| | | | CCTGAAGATTTTGCATTATATTACTGTCAGCAATATGATT |
| | | | CCTCGCCATTCACTTTCGGCCCTGGGACCAAAGTGGATAT |
| | | | CAAACGTACGGTAGCTGCCCCTTCAGTTTTTATCTTTCCG |
| | | | CCGTCTGACGAGCAGTTAAAATCCGGGACCGCTTCTGTAG |
| | | | TTTGCCTGCTGAATAATTTTTATCCGCGTGAGGCTAAAGT |
| | | | ACAATGGAAAGTCGACAATGCTTTGCAGTCGGGAAATTCA |
| | | | CAGGAAAGTGTTACGGAGCAGGATTCTAAAGATTCCACAT |
| | | | ATTCACTCAGCTCCACCCTTACACTGAGCAAAGCCGACTA |
| | | | TGAAAAACATAAAGTTTACGCATGTGAGGTGACGCACCAA |
| | | | GGATTATCCAGTCCGGTCACAAAATCGTTTAACCGCGGTG |
| | | | AGTGT |
| 1557 | ATX-P-3472 | LC Kappa nt | GACATCGTGATGACCCAGTCTCCAGACTCCCTGGCTGTGT |
| | | | CTCTGGGCGAGAGGGCCACCATCAACTGCAAGTCCAGCCA |
| | | | GAGTGTTTTATACAGCTCCAACAATAAGAACTACTTAGCT |
| | | | TGGTACCAGCAGAAACCAGGACAGCCTCCTAAGCTGCTCA |
| | | | TTTACTGGGCATCTACCCGGGAATCCGGGGTCCCTGACCG |
| | | | ATTCAGTGGCAGCGGGTCTGGGACAGATTTCACTCTCACC |
| | | | ATCAGCAGCCTGCAGGCTGAAGATGTGGCAGTTTATTACT |
| | | | GTCAGCAATATTATAGTACTCCGTACACTTTTGGCCAGGG |
| | | | GACCAAGCTGGAGATCAAACGTACGGTAGCTGCCCCTTCA |
| | | | GTTTTTATCTTTCCGCCGTCTGACGAGCAGTTAAAATCCG |
| | | | GGACCGCTTCTGTAGTTTGCCTGCTGAATAATTTTTATCC |
| | | | GCGTGAGGCTAAAGTACAATGGAAAGTCGACAATGCTTTG |
| | | | CAGTCGGGAAATTCACAGGAAAGTGTTACGGAGCAGGATT |
| | | | CTAAAGATTCCACATATTCACTCAGCTCCACCCTTACACT |
| | | | GAGCAAAGCCGACTATGAAAAACATAAAGTTTACGCATGT |
| | | | GAGGTGACGCACCAAGGATTATCCAGTCCGGTCACAAAAT |
| | | | CGTTTAACCGCGGTGAGTGT |
| 1558 | ATX-P-3361 | LC Kappa nt | GACATCGTGATGACCCAGTCTCCAGACTCCCTGGCTGTGT |
| | | | CTCTGGGCGAGAGGGCCACCATCAACTGCAAGTCCAGCCA |
| | | | GAGTGTTTTATACAGCTCCAACAATAAGAACTACTTAGCT |
| | | | TGGTACCAGCAGAAACCAGGACAGCCTCCTAAGCTGCTCA |
| | | | TTTACTGGGCATCTAACCGGGAATCCGGGGTCCCTGACCG |
| | | | ATTCAGTGGCTCCGGGTCTGGGACAGATTTCACTCTCACC |
| | | | ATCAGCAGCCTGCAGGCTGAAGATGTGGCAGTTTATTACT |
| | | | GTCAGCAATATTATAGTACTCCGTACACTTTTGGCCAGGG |
| | | | GACCAAGCTGGAGATCAAACGTACGGTAGCTGCCCCTTCA |
| | | | GTTTTTATCTTTCCGCCGTCTGACGAGCAGTTAAAATCCG |
| | | | GGACCGCTTCTGTAGTTTGCCTGCTGAATAATTTTTATCC |
| | | | GCGTGAGGCTAAAGTACAATGGAAAGTCGACAATGCTTTG |
| | | | CAGTCGGGAAATTCACAGGAAAGTGTTACGGAGCAGGATT |
| | | | CTAAAGATTCCACATATTCACTCAGCTCCACCCTTACACT |
| | | | GAGCAAAGCCGACTATGAAAAACATAAAGTTTACGCATGT |
| | | | GAGGTGACGCACCAAGGATTATCCAGTCCGGTCACAAAAT |
| | | | CGTTTAACCGCGGTGAGTGT |
| 1559 | ATX-P-3366 | LC Kappa nt | GACATCGTGATGACCCAGTCTCCAGACTCCCTGGCTGTGT |
| | | | CTCTGGGCGAGAGGGCCACCATCAACTGCAAGTCCAGCCA |
| | | | GAGTGTTTTATACAGCTCCAACAATAAGAACTACTTAGCT |
| | | | TGGTACCAGCAGAAACCAGGACAGCCTCCTAAGCTGCTCA |
| | | | TTTACTGGGCATCTAACCGGGAATCCGGGGTCCCTGACCG |
| | | | ATTCAGTGGCTCCGGGTCTGGGACAGATTTCACTCTCACC |
| | | | ATCAGCAGCCTGCAGGCTGAAGATGTGGCAGTTTATTACT |
| | | | GTCAGCAATATTATAGTACTCCGTACACTTTTGGCCAGGG |
| | | | GACCAAGCTGGAGATCAAACGTACGGTAGCTGCCCCTTCA |
| | | | GTTTTTATCTTTCCGCCGTCTGACGAGCAGTTAAAATCCG |
| | | | GGACCGCTTCTGTAGTTTGCCTGCTGAATAATTTTTATCC |
| | | | GCGTGAGGCTAAAGTACAATGGAAAGTCGACAATGCTTTG |
| | | | CAGTCGGGAAATTCACAGGAAAGTGTTACGGAGCAGGATT |
| | | | CTAAAGATTCCACATATTCACTCAGCTCCACCCTTACACT |
| | | | GAGCAAAGCCGACTATGAAAAACATAAAGTTTACGCATGT |
| | | | GAGGTGACGCACCAAGGATTATCCAGTCCGGTCACAAAAT |
| | | | CGTTTAACCGCGGTGAGTGT |
| 1560 | ATX-P-3376 | LC Kappa nt | GACATCGTGATGACCCAGTCTCCAGACTCCCTGGCTGTGT |
| | | | CTCTGGGCGAGAGGGCCACCATCAACTGCAAGTCCAGCCA |
| | | | GAGTGTTTTATACAGCTCCAACAATAAGAACTACTTAGCT |
| | | | TGGTACCAGCAGAAACCAGGACAGCCTCCTAAGCTGCTCA |
| | | | TTTACTGGGCATCTAACCGGGAATCCGGGGTCCCTGACCG |
| | | | ATTCAGTGGCTCCGGGTCTGGGACAGATTTCACTCTCACC |
| | | | ATCAGCAGCCTGCAGGCTGAAGATGTGGCAGTTTATTACT |
| | | | GTCAGCAATATTATAGTACTCCGTACACTTTTGGCCAGGG |
| | | | GACCAAGCTGGAGATCAAACGTACGGTAGCTGCCCCTTCA |
| | | | GTTTTTATCTTTCCGCCGTCTGACGAGCAGTTAAAATCCG |
| | | | GGACCGCTTCTGTAGTTTGCCTGCTGAATAATTTTTATCC |
| | | | GCGTGAGGCTAAAGTACAATGGAAAGTCGACAATGCTTTG |
| | | | CAGTCGGGAAATTCACAGGAAAGTGTTACGGAGCAGGATT |
| | | | CTAAAGATTCCACATATTCACTCAGCTCCACCCTTACACT |
| | | | GAGCAAAGCCGACTATGAAAAACATAAAGTTTACGCATGT |
| | | | GAGGTGACGCACCAAGGATTATCCAGTCCGGTCACAAAAT |
| | | | CGTTTAACCGCGGTGAGTGT |
| 1561 | ATX-P-3477 | LC Kappa nt | GACATCGTGATGACCCAGTCTCCAGACTCCCTGGCTGTGT |
| | | | CTCTGGGCGAGAGGGCCACCATCAACTGCAAGTCCAGCCA |
| | | | GAGTGTTTTATACAGCTCCAACAATAAGAACTACTTAGCT |
| | | | TGGTACCAGCAGAAACCAGGACAGCCTCCTAAGCTGCTCA |
| | | | TTTACTGGGCATCTAACCGGGAATCCGGGGTCCCTGACCG |
| | | | ATTCAGTGGCTCCGGGTCTGGGACAGATTTCACTCTCACC |
| | | | ATCAGCAGCCTGCAGGCTGAAGATGTGGCAGTTTATTACT |
| | | | GTCAGCAATATTATAGTACTCCGTACACTTTTGGCCAGGG |
| | | | GACCAAGCTGGAGATCAAACGTACGGTAGCTGCCCCTTCA |
| | | | GTTTTTATCTTTCCGCCGTCTGACGAGCAGTTAAAATCCG |
| | | | GGACCGCTTCTGTAGTTTGCCTGCTGAATAATTTTTATCC |
| | | | GCGTGAGGCTAAAGTACAATGGAAAGTCGACAATGCTTTG |
| | | | CAGTCGGGAAATTCACAGGAAAGTGTTACGGAGCAGGATT |
| | | | CTAAAGATTCCACATATTCACTCAGCTCCACCCTTACACT |
| | | | GAGCAAAGCCGACTATGAAAAACATAAAGTTTACGCATGT |
| | | | GAGGTGACGCACCAAGGATTATCCAGTCCGGTCACAAAAT |
| | | | CGTTTAACCGCGGTGAGTGT |
| 1562 | ATX-P-3418 | LC Kappa nt | GACATCCAGATGACCCAGTCTCCATCCTCCCTGTCTGCAT |
| | | | CTGTAGGAGACAGAGTCACCATCACCTGCCGGGCAAGTCA |
| | | | GACCATTAGAAACTTTTTAAATTGGTATCAGCGGAAACCA |
| | | | GGGAAAGCCCCTAAGATCCTGATCTATGCTGCATCCAGTT |
| | | | TGCAAAGTGGGGTCCCATCAAGGTTCAGTGGCAGTGGATC |
| | | | TGGGACAGATTTCACTCTCACCATCAGCAGTCTGCAACCT |
| | | | GCAGATTTTGCAACTTACTACTGTCAACAGACTTACAGTA |
| | | | TCCCGATCACCTTCGGCCAAGGGACACGACTGGAGATTAA |
| | | | ACGTACGGTAGCTGCCCCTTCAGTTTTTATCTTTCCGCCG |
| | | | TCTGACGAGCAGTTAAAATCCGGGACCGCTTCTGTAGTTT |
| | | | GCCTGCTGAATAATTTTTATCCGCGTGAGGCTAAAGTACA |
| | | | ATGGAAAGTCGACAATGCTTTGCAGTCGGGAAATTCACAG |
| | | | GAAAGTGTTACGGAGCAGGATTCTAAAGATTCCACATATT |
| | | | CACTCAGCTCCACCCTTACACTGAGCAAAGCCGACTATGA |
| | | | AAAACATAAAGTTTACGCATGTGAGGTGACGCACCAAGGA |
| | | | TTATCCAGTCCGGTCACAAAATCGTTTAACCGCGGTGAGT |
| | | | GT |
| 1563 | ATX-P-3420 | LC Kappa nt | GACATCCAGATGACCCAGTCTCCATCCTCCCTGTCTGCAT |
| | | | CTGTAGGAGACAGAGTCACCATCACTTGCCGGGCAAGTCA |
| | | | GAGCATTAGCAGGTATTTAAATTGGTATCAGCAGAAACCA |
| | | | GGGAAAGCCCCTAAACTCCTGCTCTATGCTGCATCCAGTT |
| | | | TGCAAAGTGGGGTCCCATCAAAGTTCAGCGGCAGTGGATC |
| | | | TGGGACAGATTTCACTCTCACCATCAGCAGCCTGCAACCT |
| | | | GAAGATTTTGCAACTTACTACTGTCAACAGAGTTACAGTT |
| | | | CCCCGATCACCTTCGGCCAAGGGACACGACTGGAGATTAA |
| | | | ACGTACGGTAGCTGCCCCTTCAGTTTTTATCTTTCCGCCG |
| | | | TCTGACGAGCAGTTAAAATCCGGGACCGCTTCTGTAGTTT |
| | | | GCCTGCTGAATAATTTTTATCCGCGTGAGGCTAAAGTACA |
| | | | ATGGAAAGTCGACAATGCTTTGCAGTCGGGAAATTCACAG |
| | | | GAAAGTGTTACGGAGCAGGATTCTAAAGATTCCACATATT |
| | | | CACTCAGCTCCACCCTTACACTGAGCAAAGCCGACTATGA |
| | | | AAAACATAAAGTTTACGCATGTGAGGTGACGCACCAAGGA |
| | | | TTATCCAGTCCGGTCACAAAATCGTTTAACCGCGGTGAGT |
| | | | GT |
| 1564 | ATX-P-3426 | LC Kappa nt | GATATTGTGATGACTCAGTCTCCACTCTCCCTGCCCGTCA |
| | | | CCCCTGGAGAGCCGGCCTCCATCTCCTGCAGGTCTAGTCA |
| | | | GAGCCTCCTGCATAGTAATGGATACAACTATTTGGATTGG |
| | | | TACCTGCAGAAGCCAGGGCAGTCTCCACAGCTCCTGATCT |
| | | | ATTTGGGTTCTAATCGGGCCTCCGGGGTCCCTGACAGGTT |
| | | | CAGTGGCAGTGGATCAGGCACAGATTTTACACTGAAAATC |
| | | | AGCAGAGTGGAGGCTGAGGATGTTGGGGTTTATTACTGCA |
| | | | TGCAAACTCTACAAACTCCTCCGACGTTCGGCCAAGGGAC |
| | | | CAAGGTGGAAATCAAACGTACGGTAGCTGCCCCTTCAGTT |
| | | | TTTATCTTTCCGCCGTCTGACGAGCAGTTAAAATCCGGGA |
| | | | CCGCTTCTGTAGTTTGCCTGCTGAATAATTTTTATCCGCG |
| | | | TGAGGCTAAAGTACAATGGAAAGTCGACAATGCTTTGCAG |
| | | | TCGGGAAATTCACAGGAAAGTGTTACGGAGCAGGATTCTA |
| | | | AAGATTCCACATATTCACTCAGCTCCACCCTTACACTGAG |
| | | | CAAAGCCGACTATGAAAAACATAAAGTTTACGCATGTGAG |
| | | | GTGACGCACCAAGGATTATCCAGTCCGGTCACAAAATCGT |
| | | | TTAACCGCGGTGAGTGT |
| 1565 | ATX-P-3432 | LC Kappa nt | GACATCCAGTTGACCCAGTCTCCATCCTTCCTGTCTGCAT |
| | | | CTGTAGGAGACAGACTCACCATCACTTGCCGGGCCAGTCA |
| | | | GGGCATTAGCAGTTATTTAGCCTGGTATCAGCAAAAACCA |
| | | | GGGAAAGCCCCTAAGCTCCTGATCTATACTGCATCCACTT |
| | | | TACAAAGTGGGGTCCCATCAAGGTTCAGCGGCAGTGGATC |
| | | | TGGGACAGAATTCACTCTCACAATCAGCAGCCTGCAGCCT |
| | | | GAAGATTTTGCAACTTATTACTGTCAACAGCTTAATGGTT |
| | | | ACCCTCCGACGTTCGGCCAAGGGACCAAGGTGGAAATCAA |
| | | | ACGTACGGTAGCTGCCCCTTCAGTTTTTATCTTTCCGCCG |
| | | | TCTGACGAGCAGTTAAAATCCGGGACCGCTTCTGTAGTTT |
| | | | GCCTGCTGAATAATTTTTATCCGCGTGAGGCTAAAGTACA |
| | | | ATGGAAAGTCGACAATGCTTTGCAGTCGGGAAATTCACAG |
| | | | GAAAGTGTTACGGAGCAGGATTCTAAAGATTCCACATATT |
| | | | CACTCAGCTCCACCCTTACACTGAGCAAAGCCGACTATGA |
| | | | AAAACATAAAGTTTACGCATGTGAGGTGACGCACCAAGGA |
| | | | TTATCCAGTCCGGTCACAAAATCGTTTAACCGCGGTGAGT |
| | | | GT |
| 1566 | ATX-P-3433 | LC Kappa nt | GACATCCAGATGACCCAGTCTCCATCCTCCCTGTCTGCAT |
| | | | CTGTAGGAGACAGAGTCACCATCACTTGCCGGGCAAGTCA |
| | | | GAGCATTACCAGCTATTTAAATTGGTATCAGCAGAAACCA |
| | | | GGGAAAGCCCCTAAGCTCCTGATCTTTGCTGCATCCAGTT |
| | | | TGCAAAGTGGGGTCCCATCAAGGTTCAGTGGCAGTGGATC |
| | | | TGGGACAGATTTCACTCTCACCATCAGCAGTCTGCAACCT |
| | | | GAAGATTTTGCAACTTACTACTGTCAACAGAGTTACAGTA |
| | | | CCCCTCTCACTTTCGGCGGAGGGACCAAGGTGGAGATCAA |
| | | | ACGTACGGTAGCTGCCCCTTCAGTTTTTATCTTTCCGCCG |
| | | | TCTGACGAGCAGTTAAAATCCGGGACCGCTTCTGTAGTTT |
| | | | GCCTGCTGAATAATTTTTATCCGCGTGAGGCTAAAGTACA |
| | | | ATGGAAAGTCGACAATGCTTTGCAGTCGGGAAATTCACAG |
| | | | GAAAGTGTTACGGAGCAGGATTCTAAAGATTCCACATATT |
| | | | CACTCAGCTCCACCCTTACACTGAGCAAAGCCGACTATGA |
| | | | AAAACATAAAGTTTACGCATGTGAGGTGACGCACCAAGGA |
| | | | TTATCCAGTCCGGTCACAAAATCGTTTAACCGCGGTGAGT |
| | | | GT |
| 1567 | ATX-P-3438 | LC Kappa nt | GACATCGTGATGACCCAGTCTCCAGACTCCCTGGCTGTGT |
| | | | CTCTGGGCGAGAGGGCCACCATCAACTGCAAGTCCAGCCA |
| | | | GAGTGTTTTATACAGCTCCAACAATAAGAACTACTTAGCT |
| | | | TGGTACCAGCAGAAACCAGGACAGCCTCCTAAGCTGCTCA |
| | | | TTTACTGGGCATCTACCCGGGAATCCGGGGTCCCTGACCG |
| | | | ATTCAGTGGCAGCGGGTCTGGGACAGATTTCACTCTCACC |
| | | | ATCAGCAGCCTGCAGGCTGAAGATGTGGCAGTTTATTACT |
| | | | GTCAGCAATATTATAGTACTCCTCGGACGTTCGGCCAGGG |
| | | | GACCAAGGTGGAAATCAAACGTACGGTAGCTGCCCCTTCA |
| | | | GTTTTTATCTTTCCGCCGTCTGACGAGCAGTTAAAATCCG |
| | | | GGACCGCTTCTGTAGTTTGCCTGCTGAATAATTTTTATCC |
| | | | GCGTGAGGCTAAAGTACAATGGAAAGTCGACAATGCTTTG |
| | | | CAGTCGGGAAATTCACAGGAAAGTGTTACGGAGCAGGATT |
| | | | CTAAAGATTCCACATATTCACTCAGCTCCACCCTTACACT |
| | | | GAGCAAAGCCGACTATGAAAAACATAAAGTTTACGCATGT |
| | | | GAGGTGACGCACCAAGGATTATCCAGTCCGGTCACAAAAT |
| | | | CGTTTAACCGCGGTGAGTGT |
| 1568 | ATX-P-3441 | LC Kappa nt | GACATCCAGATGACCCAGTCTCCATCCTCCCTGTCTGCAT |
| | | | CTGTAGGAGAAAGAGTCACCATCACTTGCCGGGCAAGTCA |
| | | | GAGCATTAGCAGCTATTTAAATTGGTATCAGCAGAAACCA |
| | | | GGGAAAGCCCCTAACCTCCTGATCTATGCTGCATCCAGTT |
| | | | TCCAAAGTGGGGTCCCATCAAGGGTCAGTGGCAGTGGATC |
| | | | TGGGACAGATTTCACTCTCACCATCAGCAGTCTGCAACCT |
| | | | GAGGATTTTGCAACTTACTACTGTCAACAGAGTTACAGTA |
| | | | ACCCGTACACTTTTGGCCAGGGGACCAAGCTGGAGATCAA |
| | | | ACGTACGGTAGCTGCCCCTTCAGTTTTTATCTTTCCGCCG |
| | | | TCTGACGAGCAGTTAAAATCCGGGACCGCTTCTGTAGTTT |
| | | | GCCTGCTGAATAATTTTTATCCGCGTGAGGCTAAAGTACA |
| | | | ATGGAAAGTCGACAATGCTTTGCAGTCGGGAAATTCACAG |
| | | | GAAAGTGTTACGGAGCAGGATTCTAAAGATTCCACATATT |
| | | | CACTCAGCTCCACCCTTACACTGAGCAAAGCCGACTATGA |
| | | | AAAACATAAAGTTTACGCATGTGAGGTGACGCACCAAGGA |
| | | | TTATCCAGTCCGGTCACAAAATCGTTTAACCGCGGTGAGT |
| | | | GT |
| 1569 | ATX-P-3446 | LC Kappa nt | GAAATTGTGTTGACGCAGTCTCCAGGCACCCTGTCTTTGT |
| | | | CTCCAGGGGAAAGAGCCACCCTCTCCTGCAGGGCCAGTCA |
| | | | GAGTGTTAGTAGAAGCTACTTAGCCTGGTACCAGCAGAAA |
| | | | CCTGGCCAGGCTCCCAGGCTCCTCATCTATGGTGCATCCA |
| | | | GCAGGGCCACTGGCATCCCAGACAGGTTCAGTGGCAGTGG |
| | | | GTCTGGGACAGACTTCACTCTCACCATCAGCAGACTGGAG |
| | | | CCTGAAGATTTTGCAGTGTATTACTGTCAGCAGTATGGTA |
| | | | GCTCACCGTGGACGTTCGGCCAAGGGACCAAGGTGGAAAT |
| | | | CAAACGTACGGTAGCTGCCCCTTCAGTTTTTATCTTTCCG |
| | | | CCGTCTGACGAGCAGTTAAAATCCGGGACCGCTTCTGTAG |
| | | | TTTGCCTGCTGAATAATTTTTATCCGCGTGAGGCTAAAGT |
| | | | ACAATGGAAAGTCGACAATGCTTTGCAGTCGGGAAATTCA |
| | | | CAGGAAAGTGTTACGGAGCAGGATTCTAAAGATTCCACAT |
| | | | ATTCACTCAGCTCCACCCTTACACTGAGCAAAGCCGACTA |
| | | | TGAAAAACATAAAGTTTACGCATGTGAGGTGACGCACCAA |
| | | | GGATTATCCAGTCCGGTCACAAAATCGTTTAACCGCGGTG |
| | | | AGTGT |
| 1570 | ATX-P-3452 | LC Kappa nt | GATATTGTGATGACTCAGTCTCCACTCTCCCTGCCCGTCA |
| | | | CCCCTGGAGAGCCGGCCTCCATCTCCTGCAGGTCTAGTCA |
| | | | GATCCTCCTGCATACTAATGGATACAACTATTTGGATTGG |
| | | | TACCTGCAGAAGCCAGGGCAGTCTCCTCAGCTCCTGATCT |
| | | | ATTTGGGTTCTTATCGGGCCTCCGGGGTCCCTGACAGGTT |
| | | | CAGTGGCAGTGGATCAGGCACAGATTTTACACTGAAAATC |
| | | | AGCAGAGTGGAGGCTGGGGATGTTGGGCTTTATTACTGCA |
| | | | TGCAAGCTCTACAAACTCCGCTCACTTTCGGCGGAGGGAC |
| | | | CAAGGTGGAGATCAAACGTACGGTAGCTGCCCCTTCAGTT |
| | | | TTTATCTTTCCGCCGTCTGACGAGCAGTTAAAATCCGGGA |
| | | | CCGCTTCTGTAGTTTGCCTGCTGAATAATTTTTATCCGCG |
| | | | TGAGGCTAAAGTACAATGGAAAGTCGACAATGCTTTGCAG |
| | | | TCGGGAAATTCACAGGAAAGTGTTACGGAGCAGGATTCTA |
| | | | AAGATTCCACATATTCACTCAGCTCCACCCTTACACTGAG |
| | | | CAAAGCCGACTATGAAAAACATAAAGTTTACGCATGTGAG |
| | | | GTGACGCACCAAGGATTATCCAGTCCGGTCACAAAATCGT |
| | | | TTAACCGCGGTGAGTGT |
| 1571 | ATX-P-3360 | LC Kappa aa | DIVMTQSPDSLAVSLGERATINCKSSQSVLYSSNNKNYLA |
| | | | WYQQKPGQPPKLLIYWASNRESGVPDRFSGSGSGTDFTLT |
| | | | ISSLQAEDVAVYYCQQYYSTPYTFGQGTKLEIKRTVAAPS |
| | | | VFIFPPSDEQLKSGTASVVCLLNNFYPREAKVQWKVDNAL |
| | | | QSGNSQESVTEQDSKDSTYSLSSTLILSKADYEKHKVYAC |
| | | | EVTHQGLSSPVTKSFNRGEC |
| 1572 | ATX-P-3362 | LC Kappa aa | DIVMTQSPDSLAVSLGERATINCKSSQSVLYSSNNKNYLA |
| | | | WYQQKPGQPPKLLIYWASNRESGVPDRFSGSGSGTDFTLT |
| | | | ISSLQAEDVAVYYCQQYYSTPYTFGQGTKLEIKRTVAAPS |
| | | | VFIFPPSDEQLKSGTASVVCLLNNFYPREAKVQWKVDNAL |
| | | | QSGNSQESVTEQDSKDSTYSLSSTLTLSKADYEKHKVYAC |
| | | | EVTHQGLSSPVTKSFNRGEC |
| 1573 | ATX-P-3363 | LC Kappa aa | DIVMTQSPDSLAVSLGERATINCKSSQSVLYSSNNKNYLA |
| | | | WYQQKPGQPPKLLIYWASNRESGVPDRFSGSGSGTDFTLT |
| | | | ISSLQAEDVAVYYCQQYYSTPYTFGQGTKLEIKRTVAAPS |
| | | | VFIFPPSDEQLKSGTASVVCLLNNFYPREAKVQWKVDNAL |
| | | | QSGNSQESVTEQDSKDSTYSLSSTLILSKADYEKHKVYAC |
| | | | EVTHQGLSSPVTKSFNRGEC |
| 1574 | ATX-P-3365 | LC Kappa aa | DIVMTQSPDSLAVSLGERATINCKSSQSVLYSSNNKNYLA |
| | | | WYQQKPGQPPKLLIYWASNRESGVPDRFSGSGSGTDFTLT |
| | | | ISSLQAEDVAVYYCQQYYSTPYTFGQGTKLEIKRTVAAPS |
| | | | VFIFPPSDEQLKSGTASVVCLLNNFYPREAKVQWKVDNAL |
| | | | QSGNSQESVTEQDSKDSTYSLSSTLTLSKADYEKHKVYAC |
| | | | EVTHQGLSSPVTKSFNRGEC |
| 1575 | ATX-P-3367 | LC Kappa aa | DIVMTQSPDSLAVSLGERATINCKSSQSVLYSSNNKNYLA |
| | | | WYQQKPGQPPKLLIYWASNRESGVPDRFSGSGSGTDFTLT |
| | | | ISSLQAEDVAVYYCQQYYSTPYTFGQGTKLEIKRTVAAPS |
| | | | VFIFPPSDEQLKSGTASVVCLLNNFYPREAKVQWKVDNAL |
| | | | QSGNSQESVTEQDSKDSTYSLSSTLTLSKADYEKHKVYAC |
| | | | EVTHQGLSSPVTKSFNRGEC |
| 1576 | ATX-P-3369 | LC Kappa aa | DIVMTQSPDSLAVSLGERATINCKSSQSVLYSSNNKNYLA |
| | | | WYQQKPGQPPKLLIYWASNRESGVPDRFSGSGSGTDFTLT |
| | | | ISSLQAEDVAVYYCQQYYSTPYTFGQGTKLEIKRTVAAPS |
| | | | VFIFPPSDEQLKSGTASVVCLLNNFYPREAKVQWKVDNAL |
| | | | QSGNSQESVTEQDSKDSTYSLSSTLTLSKADYEKHKVYAC |
| | | | EVTHQGLSSPVTKSFNRGEC |
| 1577 | ATX-P-3370 | LC Kappa aa | DIVMTQSPDSLAVSLGERATINCKSSQSVLYSSNNKNYLA |
| | | | WYQQKPGQPPKLLIYWASNRESGVPDRFSGSGSGTDFTLT |
| | | | ISSLQAEDVAVYYCQQYYSTPYTFGQGTKLEIKRTVAAPS |
| | | | VFIFPPSDEQLKSGTASVVCLLNNFYPREAKVQWKVDNAL |
| | | | QSGNSQESVTEQDSKDSTYSLSSTLTLSKADYEKHKVYAC |
| | | | EVTHQGLSSPVTKSFNRGEC |
| 1578 | ATX-P-3371 | LC Kappa aa | DIVMTQSPDSLAVSLGERATINCKSSQSVLYSSNNKNYLA |
| | | | WYQQKPGQPPKLLIYWASNRESGVPDRFSGSGSGTDFTLT |
| | | | ISSLQAEDVAVYYCQQYYSTPYTFGQGTKLEIKRTVAAPS |
| | | | VFIFPPSDEQLKSGTASVVCLLNNFYPREAKVQWKVDNAL |
| | | | QSGNSQESVTEQDSKDSTYSLSSTLILSKADYEKHKVYAC |
| | | | EVTHQGLSSPVTKSFNRGEC |
| 1579 | ATX-P-3373 | LC Kappa aa | DIVMTQSPDSLAVSLGERATINCKSSQSVLYSSNNKNYLA |
| | | | WYQQKPGQPPKLLIYWASNRESGVPDRFSGSGSGTDFTLT |
| | | | ISSLQAEDVAVYYCQQYYSTPYTFGQGTKLEIKRTVAAPS |
| | | | VFIFPPSDEQLKSGTASVVCLLNNFYPREAKVQWKVDNAL |
| | | | QSGNSQESVTEQDSKDSTYSLSSTLTLSKADYEKHKVYAC |
| | | | EVTHQGLSSPVTKSFNRGEC |
| 1580 | ATX-P-3375 | LC Kappa aa | DIVMTQSPDSLAVSLGERATINCKSSQSVLYSSNNKNYLA |
| | | | WYQQKPGQPPKLLIYWASNRESGVPDRFSGSGSGTDFTLT |
| | | | ISSLQAEDVAVYYCQQYYSTPYTFGQGTKLEIKRTVAAPS |
| | | | VFIFPPSDEQLKSGTASVVCLLNNFYPREAKVQWKVDNAL |
| | | | QSGNSQESVTEQDSKDSTYSLSSTLTLSKADYEKHKVYAC |
| | | | EVTHQGLSSPVTKSFNRGEC |
| 1581 | ATX-P-3378 | LC Kappa aa | DIVMTQSPDSLAVSLGERATINCKSSQSVLYSSNNKNYLA |
| | | | WYQQKPGQPPKLLIYWASNRESGVPDRFSGSGSGTDFTLT |
| | | | ISSLQAEDVAVYYCQQYYSTPYTFGQGTKLEIKRTVAAPS |
| | | | VFIFPPSDEQLKSGTASVVCLLNNFYPREAKVQWKVDNAL |
| | | | QSGNSQESVTEQDSKDSTYSLSSTLTLSKADYEKHKVYAC |
| | | | EVTHQGLSSPVTKSFNRGEC |
| 1582 | ATX-P-3382 | LC Kappa aa | DIVMTQSPDSLAVSLGERATINCKSSQSVLYSSNNKNYLA |
| | | | WYQQKPGQPPKLLIYWASNRESGVPDRFSGSGSGTDFTLT |
| | | | ISSLQAEDVAVYYCQQYYSTPYTFGQGTKLEIKRTVAAPS |
| | | | VFIFPPSDEQLKSGTASVVCLLNNFYPREAKVQWKVDNAL |
| | | | QSGNSQESVTEQDSKDSTYSLSSTLILSKADYEKHKVYAC |
| | | | EVTHQGLSSPVTKSFNRGEC |
| 1583 | ATX-P-3383 | LC Kappa aa | DIVMTQSPDSLAVSLGERATINCKSSQSVLYSSNNKNYLA |
| | | | WYQQKPGQPPKLLIYWASNRESGVPDRFSGSGSGTDFTLT |
| | | | ISSLQAEDVAVYYCQQYYSTPYTFGQGTKLEIKRTVAAPS |
| | | | VFIFPPSDEQLKSGTASVVCLLNNFYPREAKVQWKVDNAL |
| | | | QSGNSQESVTEQDSKDSTYSLSSTLTLSKADYEKHKVYAC |
| | | | EVTHQGLSSPVTKSFNRGEC |
| 1584 | ATX-P-3384 | LC Kappa aa | DIVMTQSPDSLAVSLGERATINCKSSQSVLYSSNNKNYLA |
| | | | WYQQKPGQPPKLLIYWASNRESGVPDRFSGSGSGTDFTLT |
| | | | ISSLQAEDVAVYYCQQYYSTPYTFGQGTKLEIKRTVAAPS |
| | | | VFIFPPSDEQLKSGTASVVCLLNNFYPREAKVQWKVDNAL |
| | | | QSGNSQESVTEQDSKDSTYSLSSTLTLSKADYEKHKVYAC |
| | | | EVTHQGLSSPVTKSFNRGEC |
| 1585 | ATX-P-3386 | LC Kappa aa | DIVMTQSPDSLAVSLGERATINCKSSQSVLYSSNNKNYLA |
| | | | WYQQKPGQPPKLLIYWASNRESGVPDRFSGSGSGTDFTLT |
| | | | ISSLQAEDVAVYYCQQYYSTPYTFGQGTKLEIKRTVAAPS |
| | | | VFIFPPSDEQLKSGTASVVCLLNNFYPREAKVQWKVDNAL |
| | | | QSGNSQESVTEQDSKDSTYSLSSTLTLSKADYEKHKVYAC |
| | | | EVTHQGLSSPVTKSFNRGEC |
| 1586 | ATX-P-3387 | LC Kappa aa | DIVMTQSPDSLAVSLGERATINCKSSQSVLYSSNNKNYLA |
| | | | WYQQKPGQPPKLLIYWASNRESGVPDRFSGSGSGTDFTLT |
| | | | ISSLQAEDVAVYYCQQYYSTPYTFGQGTKLEIKRTVAAPS |
| | | | VFIFPPSDEQLKSGTASVVCLLNNFYPREAKVQWKVDNAL |
| | | | QSGNSQESVTEQDSKDSTYSLSSTLTLSKADYEKHKVYAC |
| | | | EVTHQGLSSPVTKSFNRGEC |
| 1587 | ATX-P-3389 | LC Kappa aa | DIVMTQSPDSLAVSLGERATINCKSSQSVLYSSNNKNYLA |
| | | | WYQQKPGQPPKLLIYWASNRESGVPDRFSGSGSGTDFTLT |
| | | | ISSLQAEDVAVYYCQQYYSTPYTFGQGTKLEIKRTVAAPS |
| | | | VFIFPPSDEQLKSGTASVVCLLNNFYPREAKVQWKVDNAL |
| | | | QSGNSQESVTEQDSKDSTYSLSSTLILSKADYEKHKVYAC |
| | | | EVTHQGLSSPVTKSFNRGEC |
| 1588 | ATX-P-3391 | LC Kappa aa | DIVMTQSPDSLAVSLGERATINCKSSQSVLYSSNNKNYLA |
| | | | WYQQKPGQPPKLLIYWASNRESGVPDRFSGSGSGTDFTLT |
| | | | ISSLQAEDVAVYYCQQYYSTPYTFGQGTKLEIKRTVAAPS |
| | | | VFIFPPSDEQLKSGTASVVCLLNNFYPREAKVQWKVDNAL |
| | | | QSGNSQESVTEQDSKDSTYSLSSTLTLSKADYEKHKVYAC |
| | | | EVTHQGLSSPVTKSFNRGEC |
| 1589 | ATX-P-3392 | LC Kappa aa | DIVMTQSPDSLAVSLGERATINCKSSQSVLYSSNNKNYLA |
| | | | WYQQKPGQPPKLLIYWASNRESGVPDRFSGSGSGTDFTLT |
| | | | ISSLQAEDVAVYYCQQYYSTPYTFGQGTKLEIKRTVAAPS |
| | | | VFIFPPSDEQLKSGTASVVCLLNNFYPREAKVQWKVDNAL |
| | | | QSGNSQESVTEQDSKDSTYSLSSTLTLSKADYEKHKVYAC |
| | | | EVTHQGLSSPVTKSFNRGEC |
| 1590 | ATX-P-3395 | LC Kappa aa | DIQMTQSPSTLSASVGDSVTITCRASQNIITWLAWYQQKP |
| | | | GKAPNLLIYKASSLESGVPSRFSGSGSGTEFTLTISSLQP |
| | | | DDFATYYCQQYSSYSYTFGQGTKLEIKRTVAAPSVFIFPP |
| | | | SDEQLKSGTASVVCLLNNFYPREAKVQWKVDNALQSGNSQ |
| | | | ESVTEQDSKDSTYSLSSTLILSKADYEKHKVYACEVTHQG |
| | | | LSSPVTKSFNRGEC |
| 1591 | ATX-P-3396 | LC Kappa aa | DIQMTQSPSTLSASVGDSVTITCRASQNIITWLAWYQQKP |
| | | | GKAPNLLIYKASSLESGVPSRFSGSGSGTEFTLTISSLQP |
| | | | DDFATYYCQQYSSYSYTFGQGTKLEIKRTVAAPSVFIFPP |
| | | | SDEQLKSGTASVVCLLNNFYPREAKVQWKVDNALQSGNSQ |
| | | | ESVTEQDSKDSTYSLSSTLTLSKADYEKHKVYACEVTHQG |
| | | | LSSPVTKSFNRGEC |
| 1592 | ATX-P-3397 | LC Kappa aa | DIQMTQSPSTLSASVGDSVTITCRASQNIITWLAWYQQKP |
| | | | GKAPNLLIYKASSLESGVPSRFSGSGSGTEFTLTISSLQP |
| | | | DDFATYYCQQYSSYSYTFGQGTKLEIKRTVAAPSVFIFPP |
| | | | SDEQLKSGTASVVCLLNNFYPREAKVQWKVDNALQSGNSQ |
| | | | ESVTEQDSKDSTYSLSSTLTLSKADYEKHKVYACEVTHQG |
| | | | LSSPVTKSFNRGEC |
| 1593 | ATX-P-3405 | LC Kappa aa | DIQMTQSPSTLSASVGDSVTITCRASQNIITWLAWYQQKP |
| | | | GKAPNLLIYKASSLESGVPSRFSGSGSGTEFTLTISSLQP |
| | | | DDFATYYCQQYSSYSYTFGQGTKLEIKRTVAAPSVFIFPP |
| | | | SDEQLKSGTASVVCLLNNFYPREAKVQWKVDNALQSGNSQ |
| | | | ESVTEQDSKDSTYSLSSTLTLSKADYEKHKVYACEVTHQG |
| | | | LSSPVTKSFNRGEC |
| 1594 | ATX-P-3406 | LC Kappa aa | DIQMTQSPSTLSASVGDSVTITCRASQNIITWLAWYQQKP |
| | | | GKAPNLLIYKASSLESGVPSRFSGSGSGTEFTLTISSLQP |
| | | | DDFATYYCQQYSSYSYTFGQGTKLEIKRTVAAPSVFIFPP |
| | | | SDEQLKSGTASVVCLLNNFYPREAKVQWKVDNALQSGNSQ |
| | | | ESVTEQDSKDSTYSLSSTLTLSKADYEKHKVYACEVTHQG |
| | | | LSSPVTKSFNRGEC |
| 1595 | ATX-P-3407 | LC Kappa aa | DIQMTQSPSTLSASVGDSVTITCRASQNIITWLAWYQQKP |
| | | | GKAPNLLIYKASSLESGVPSRFSGSGSGTEFTLTISSLQP |
| | | | DDFATYYCQQYSSYSYTFGQGTKLEIKRTVAAPSVFIFPP |
| | | | SDEQLKSGTASVVCLLNNFYPREAKVQWKVDNALQSGNSQ |
| | | | ESVTEQDSKDSTYSLSSTLTLSKADYEKHKVYACEVTHQG |
| | | | LSSPVTKSFNRGEC |
| 1596 | ATX-P-3408 | LC Kappa aa | DIQMTQSPSTLSASVGDSVTITCRASQNIITWLAWYQQKP |
| | | | GKAPNLLIYKASSLESGVPSRFSGSGSGTEFTLTISSLQP |
| | | | DDFATYYCQQYSSYSYTFGQGTKLEIKRTVAAPSVFIFPP |
| | | | SDEQLKSGTASVVCLLNNFYPREAKVQWKVDNALQSGNSQ |
| | | | ESVTEQDSKDSTYSLSSTLTLSKADYEKHKVYACEVTHQG |
| | | | LSSPVTKSFNRGEC |
| 1597 | ATX-P-3410 | LC Kappa aa | DIQMTQSPSTLSASVGDSVTITCRASQNIITWLAWYQQKP |
| | | | GKAPNLLIYKASSLESGVPSRFSGSGSGTEFTLTISSLQP |
| | | | DDFATYYCQQYSSYSYTFGQGTKLEIKRTVAAPSVFIFPP |
| | | | SDEQLKSGTASVVCLLNNFYPREAKVQWKVDNALQSGNSQ |
| | | | ESVTEQDSKDSTYSLSSTLILSKADYEKHKVYACEVTHQG |
| | | | LSSPVTKSFNRGEC |
| 1598 | ATX-P-3412 | LC Kappa aa | DIQMTQSPSTLSASVGDSVTITCRASQNIITWLAWYQQKP |
| | | | GKAPNLLIYKASSLESGVPSRFSGSGSGTEFTLTISSLQP |
| | | | DDFATYYCQQYSSYSYTFGQGTKLEIKRTVAAPSVFIFPP |
| | | | SDEQLKSGTASVVCLLNNFYPREAKVQWKVDNALQSGNSQ |
| | | | ESVTEQDSKDSTYSLSSTLILSKADYEKHKVYACEVTHQG |
| | | | LSSPVIKSENRGEC |
| 1599 | ATX-P-3413 | LC Kappa aa | DIQMTQSPSTLSASVGDSVTITCRASQNIITWLAWYQQKP |
| | | | GKAPNLLIYKASSLESGVPSRFSGSGSGTEFTLTISSLQP |
| | | | DDFATYYCQQYSSYSYTFGQGTKLEIKRTVAAPSVFIFPP |
| | | | SDEQLKSGTASVVCLLNNFYPREAKVQWKVDNALQSGNSQ |
| | | | ESVTEQDSKDSTYSLSSTLTLSKADYEKHKVYACEVTHQG |
| | | | LSSPVTKSFNRGEC |
| 1600 | ATX-P-3414 | LC Kappa aa | DIQMTQSPSTLSASVGDSVTITCRASQNIITWLAWYQQKP |
| | | | GKAPNLLIYKASSLESGVPSRFSGSGSGTEFTLTISSLQP |
| | | | DDFATYYCQQYSSYSYTFGQGTKLEIKRTVAAPSVFIFPP |
| | | | SDEQLKSGTASVVCLLNNFYPREAKVQWKVDNALQSGNSQ |
| | | | ESVTEQDSKDSTYSLSSTLTLSKADYEKHKVYACEVTHQG |
| | | | LSSPVTKSENRGEC |
| 1601 | ATX-P-3419 | LC Kappa aa | AIQMTQSPSSLSASVGDRVTITCRASQGIRNDLGWYQQKP |
| | | | GKAPKLLIYAASSLQSGVPSRFSGSGSGTDFTLTISSLQP |
| | | | EDFATYYCLQDYNYPWTFGQGTKVEIKRTVAAPSVFIFPP |
| | | | SDEQLKSGTASVVCLLNNFYPREAKVQWKVDNALQSGNSQ |
| | | | ESVTEQDSKDSTYSLSSTLTLSKADYEKHKVYACEVTHQG |
| | | | LSSPVTKSFNRGEC |
| 1602 | ATX-P-3421 | LC Kappa aa | DIVMTQSPDSLAVSLGERATINCKSSQTVLYRSNNKNYLA |
| | | | WYQQKPGQPPKLLIYWASTRESGVPDRFSGSGSGTDFTLT |
| | | | ISSLQAEDVAVYYCQQYYSTPWTFGQGTKVEIKRTVAAPS |
| | | | VFIFPPSDEQLKSGTASVVCLLNNFYPREAKVQWKVDNAL |
| | | | QSGNSQESVTEQDSKDSTYSLSSTLTLSKADYEKHKVYAC |
| | | | EVTHQGLSSPVTKSFNRGEC |
| 1603 | ATX-P-3428 | LC Kappa aa | AIQMTQSPSSLSASVGDRVTITCRASQGIRNDLGWYQQNP |
| | | | GKAPKLLIYAASNLQSGVPSRFSGSGSGTDFTLTISSLQP |
| | | | EDFVTYYCLQDYNWPWTFGQGTRLEIKRTVAAPSVFIFPP |
| | | | SDEQLKSGTASVVCLLNNFYPREAKVQWKVDNALQSGNSQ |
| | | | ESVTEQDSKDSTYSLSSTLTLSKADYEKHKVYACEVTHQG |
| | | | LSSPVIKSFNRGEC |
| 1604 | ATX-P-3430 | LC Kappa aa | DIQMTQSPSSLSASVGDRVTITCRASQSISNYLNWYQQKP |
| | | | EKAPKFLIYAASSLQSGVPSRFSGSGSGTDFTLTISSLQP |
| | | | EDFATYYCQQSYSSPLTFGGGTKVEIKRTVAAPSVFIFPP |
| | | | SDEQLKSGTASVVCLLNNFYPREAKVQWKVDNALQSGNSQ |
| | | | ESVTEQDSKDSTYSLSSTLTLSKADYEKHKVYACEVTHQG |
| | | | LSSPVTKSFNRGEC |
| 1605 | ATX-P-3431 | LC Kappa aa | EIVLTQSPDFQSVTPKEKVTITCRASQSIGSNLHWFQQKP |
| | | | DQSPKLLIKYASQSFSGVPSRFSGSGSGTDFTLTINSLEA |
| | | | EDAAMYYCHQSSSLPRTFGQGTKVEIKRTVAAPSVFIFPP |
| | | | SDEQLKSGTASVVCLLNNFYPREAKVQWKVDNALQSGNSQ |
| | | | ESVTEQDSKDSTYSLSSTLTLSKADYEKHKVYACEVTHQG |
| | | | LSSPVIKSFNRGEC |
| 1606 | ATX-P-3435 | LC Kappa aa | AIQMTQSPSSLSASVGDRVTITCRASQGIRNDLGWYQQKP |
| | | | GKAPKLLIYAASSLQSGVPSRFSGSGSGTDFTLTISSLQP |
| | | | EDFASYYCLQDYNWPYTFGQGTKLEIKRTVAAPSVFIFPP |
| | | | SDEQLKSGTASVVCLLNNFYPREAKVQWKVDNALQSGNSQ |
| | | | ESVTEQDSKDSTYSLSSTLTLSKADYEKHKVYACEVTHQG |
| | | | LSSPVTKSFNRGEC |
| 1607 | ATX-P-3436 | LC Kappa aa | EIVLTQSPGTLSLSPGERATLSCRASQSVRSSYFAWYQQK |
| | | | PGQAPRLLIYGASSRATGIPDRFSGSGSGTDFTLTISRLE |
| | | | PEDFAVYYCQQYGSSPRTFGQGTKVEIKRTVAAPSVFIFP |
| | | | PSDEQLKSGTASVVCLLNNFYPREAKVQWKVDNALQSGNS |
| | | | QESVTEQDSKDSTYSLSSTLTLSKADYEKHKVYACEVTHQ |
| | | | GLSSPVTKSFNRGEC |
| 1608 | ATX-P-3437 | LC Kappa aa | DIVMTQSPDSLAVSLGERATINCKSSQSVLYSSNNKNYLA |
| | | | WYQQKPGQPPKLLIYWASTRESGVPDRFSGSGSGTDFTLT |
| | | | ISSLQAEDVAVYYCQQYFGTPRTFGQGTKVEIKRTVAAPS |
| | | | VFIFPPSDEQLKSGTASVVCLLNNFYPREAKVQWKVDNAL |
| | | | QSGNSQESVTEQDSKDSTYSLSSTLTLSKADYEKHKVYAC |
| | | | EVTHQGLSSPVTKSFNRGEC |
| 1609 | ATX-P-3440 | LC Kappa aa | EIVLTQSPATLSLSPGERATLSCRASQSVSSYLAWYQQKP |
| | | | GQAPRLLIYDASNRATGIPARFSGSGSGTDFTLTISSLQS |
| | | | EDFAVYYCQQRSNWPLTFGGGTKVEIKRTVAAPSVFIFPP |
| | | | SDEQLKSGTASVVCLLNNFYPREAKVQWKVDNALQSGNSQ |
| | | | ESVTEQDSKDSTYSLSSTLTLSKADYEKHKVYACEVTHQG |
| | | | LSSPVTKSFNRGEC |
| 1610 | ATX-P-3442 | LC Kappa aa | DIQMTQSPSSLSASVGDRVTITCRASQTIRSYLNWYQQKP |
| | | | GKAPKLLIYAASSLQSGVPSRFSGSGSGTNFTLTISSLQP |
| | | | EDFATYSCQQSYTTPLTFGGGTKVEIKRTVAAPSVFIFPP |
| | | | SDEQLKSGTASVVCLLNNFYPREAKVQWKVDNALQSGNSQ |
| | | | ESVTEQDSKDSTYSLSSTLTLSKADYEKHKVYACEVTHQG |
| | | | LSSPVTKSFNRGEC |
| 1611 | ATX-P-3444 | LC Kappa aa | EIVLTQSPGTLSLSPGERATLSCRASQSISSSYLAWYQRE |
| | | | PGQAPRLLIYGASSRATGIPDRFSGSGSGTDFTLTISRLE |
| | | | PEDFVVYYCQQYGSSPITFGQGTRLEIKRTVAAPSVFIFP |
| | | | PSDEQLKSGTASVVCLLNNFYPREAKVQWKVDNALQSGNS |
| | | | QESVTEQDSKDSTYSLSSTLTLSKADYEKHKVYACEVTHQ |
| | | | GLSSPVTKSFNRGEC |
| 1612 | ATX-P-3447 | LC Kappa aa | EIVLTQSPGTLSLSPGERATLSCRASQSVRSSYLAWYQQK |
| | | | PGQAPRLLIYGASSRATGIPDRFSGSGSGTDFTLTFSRLE |
| | | | PEDFAVYYCQQYGSSPYTFGQGTKLEIKRTVAAPSVFIFP |
| | | | PSDEQLKSGTASVVCLLNNFYPREAKVQWKVDNALQSGNS |
| | | | QESVTEQDSKDSTYSLSSTLILSKADYEKHKVYACEVTHQ |
| | | | GLSSPVTKSFNRGEC |
| 1613 | ATX-P-3448 | LC Kappa aa | DIQMTQSPSSLSASVGDRVTITCQASQDISNYLNWYQQKP |
| | | | GKAPKLLIYDASNLETGVPSRFSGSGSGTDFTFTISSLQP |
| | | | EDFATYYCQQANSFPLTFGGGTKVEIKRTVAAPSVFIFPP |
| | | | SDEQLKSGTASVVCLLNNFYPREAKVQWKVDNALQSGNSQ |
| | | | ESVTEQDSKDSTYSLSSTLTLSKADYEKHKVYACEVTHQG |
| | | | LSSPVTKSFNRGEC |
| 1614 | ATX-P-3449 | LC Kappa aa | EIVLTQSPGTLSLSPGERATLSCRASQSVSSSYLAWYQQK |
| | | | PGQAPRLLIYGASSRATGIPDRFSGSGSGTDFTLTISRLE |
| | | | PEDFAVYYCQQYGSSPFTFGPGTKVDIKRTVAAPSVFIFP |
| | | | PSDEQLKSGTASVVCLLNNFYPREAKVQWKVDNALQSGNS |
| | | | QESVTEQDSKDSTYSLSSTLTLSKADYEKHKVYACEVTHQ |
| | | | GLSSPVTKSFNRGEC |
| 1615 | ATX-P-3450 | LC Kappa aa | DIVMTQSPDSLAVSLGERATINCKSSQSVLYSSNNKNYLA |
| | | | WYQQKPGQPPKLLIYWASTRESGVPDRFSGSGSGTDFTLT |
| | | | ISSLQAEDVAVYYCQQYYSTPWTFGQGTRLEIKRTVAAPS |
| | | | VFIFPPSDEQLKSGTASVVCLLNNFYPREAKVQWKVDNAL |
| | | | QSGNSQESVTEQDSKDSTYSLSSTLTLSKADYEKHKVYAC |
| | | | EVTHQGLSSPVTKSFNRGEC |
| 1616 | ATX-P-3451 | LC Kappa aa | DIQMTQSPSSLSASVGDRVTITCRASQDISNYLNWYQQKP |
| | | | GKAPKLLIYAASSLESGVPSRFSGSGSGTDFTLTISSLQP |
| | | | EDFATYYCQQSYSTPTFGGGTKVEIKRTVAAPSVFIFPPS |
| | | | DEQLKSGTASVVCLLNNFYPREAKVQWKVDNALQSGNSQE |
| | | | SVTEQDSKDSTYSLSSTLTLSKADYEKHKVYACEVTHQGL |
| | | | SSPVTKSENRGEC |
| 1617 | ATX-P-3453 | LC Kappa aa | DIVMTQSPDSLAVSLGERATINCKSSQSVLYRSNNKNYLA |
| | | | WYQQKPGQPPKLLIYWASTRESGVPDRFSGSGSGTDFTLT |
| | | | ISSLQAEDVAVYYCQQYYGTPRTFGQGTKVEIKRTVAAPS |
| | | | VFIFPPSDEQLKSGTASVVCLLNNFYPREAKVQWKVDNAL |
| | | | QSGNSQESVTEQDSKDSTYSLSSTLTLSKADYEKHKVYAC |
| | | | EVTHQGLSSPVTKSFNRGEC |
| 1618 | ATX-P-3454 | LC Kappa aa | DIQMTQSPSSLSASVGDRVTITCQASQDIKNCLNWYQQKP |
| | | | GKAPKLLIYDASNLETGVPSRFSGSGSGTDFTFTISSLQP |
| | | | EDIATYYCQQFDNLPLTFGGGTKVEIKRTVAAPSVFIFPP |
| | | | SDEQLKSGTASVVCLLNNFYPREAKVQWKVDNALQSGNSQ |
| | | | ESVTEQDSKDSTYSLSSTLTLSKADYEKHKVYACEVTHQG |
| | | | LSSPVTKSENRGEC |
| 1619 | ATX-P-3455 | LC Kappa aa | DIVMTQSPDSLAVSLGERATINCKSSQTILYRSNIKNYLA |
| | | | WYQQKPGQPPKLLISWASTRESGVPDRFSGSGSGTDFTLT |
| | | | ISSLQAEDVAVYYCQQYYSTRTFGQGTKLEIKRTVAAPSV |
| | | | FIFPPSDEQLKSGTASVVCLLNNFYPREAKVQWKVDNALQ |
| | | | SGNSQESVTEQDSKDSTYSLSSTLTLSKADYEKHKVYACE |
| | | | VTHQGLSSPVTKSFNRGEC |
| 1620 | ATX-P-3456 | LC Kappa aa | DIVMTQSPDSLAVSLGERATINCKSSQSVLYSSNNKNYLA |
| | | | WYQQKPGQPPKLLIYWASTRESGVPDRFSGSGSGTDFTLT |
| | | | ISSLQAEDVAVYYCQQYYSTPRTFGQGTKVEIKRTVAAPS |
| | | | VFIFPPSDEQLKSGTASVVCLLNNFYPREAKVQWKVDNAL |
| | | | QSGNSQESVTEQDSKDSTYSLSSTLTLSKADYEKHKVYAC |
| | | | EVTHQGLSSPVTKSFNRGEC |
| 1621 | ATX-P-3458 | LC Kappa aa | DIQMTQSPSTLSASVGDRVTITCRASQGISSWLAWYQQKP |
| | | | GKAPKLLIYAASSLQSGVPSRFSGSGSGTDFTLTISSLQP |
| | | | EDFATYYCQQANSFPLTFGGGTKVEIKRTVAAPSVFIFPP |
| | | | SDEQLKSGTASVVCLLNNFYPREAKVQWKVDNALQSGNSQ |
| | | | ESVTEQDSKDSTYSLSSTLTLSKADYEKHKVYACEVTHQG |
| | | | LSSPVTKSFNRGEC |
| 1622 | ATX-P-3459 | LC Kappa aa | DIVMTQSPDSLAVSLGERATINCKSSQSVLYSSNNKNYLA |
| | | | WYQQKPGQPPKLLIYWASTRESGVPDRFSGSGSGTDFTLT |
| | | | ISSLQAEDVAVYYCQQYYSTPPTFGQGTKVEIKRTVAAPS |
| | | | VFIFPPSDEQLKSGTASVVCLLNNFYPREAKVQWKVDNAL |
| | | | QSGNSQESVTEQDSKDSTYSLSSTLTLSKADYEKHKVYAC |
| | | | EVTHQGLSSPVTKSFNRGEC |
| 1623 | ATX-P-3462 | LC Kappa aa | DIQMTQSPSSLSASVGDRVTITCRASQSISSYLNWYQQKP |
| | | | GKAPKLLIYAASSLQSGVPSRFSGSGSGTDFTLTISSLQP |
| | | | EDFATYYCQQSYSTPYTFGQGTKLEIKRTVAAPSVFIFPP |
| | | | SDEQLKSGTASVVCLLNNFYPREAKVQWKVDNALQSGNSQ |
| | | | ESVTEQDSKDSTYSLSSTLTLSKADYEKHKVYACEVTHQG |
| | | | LSSPVTKSFNRGEC |
| 1624 | ATX-P-3463 | LC Kappa aa | DIVMTQSPDSLAVSLGERATINCKSSQSVLYSSNNKNYLA |
| | | | WYQQKPGQPPKLLIYWASTRESGVPDRFSGSGSGTDFTLT |
| | | | ISSLQAEDVAVYYCQQFYDTPRTFGQGTKVEIKRTVAAPS |
| | | | VFIFPPSDEQLKSGTASVVCLLNNFYPREAKVQWKVDNAL |
| | | | QSGNSQESVTEQDSKDSTYSLSSTLTLSKADYEKHKVYAC |
| | | | EVTHQGLSSPVTKSFNRGEC |
| 1625 | ATX-P-3466 | LC Kappa aa | DIQMTQSPSSLSASVGDRVTITCRASQGISNYLAWYQQKP |
| | | | GKVPKLLIYVASTLQSGVPSRFSGSGSGTDFTLTISSLQP |
| | | | EDVATYYCQNYISAPLTFGGGTKVEIKRTVAAPSVFIFPP |
| | | | SDEQLKSGTASVVCLLNNFYPREAKVQWKVDNALQSGNSQ |
| | | | ESVTEQDSKDSTYSLSSTLTLSKADYEKHKVYACEVTHQG |
| | | | LSSPVTKSENRGEC |
| 1626 | ATX-P-3467 | LC Kappa aa | DIVMTQSPDSLAVSLGERATINCKSSQSVLYSSNNKNYLA |
| | | | WYQQKPGQPPKLLIYWASTRESGVPDRFSGSGSGTDFTLT |
| | | | ISSLQAEDVAVYYCQQYYSTPWTFGQGTKVEIKRTVAAPS |
| | | | VFIFPPSDEQLKSGTASVVCLLNNFYPREAKVQWKVDNAL |
| | | | QSGNSQESVTEQDSKDSTYSLSSTLTLSKADYEKHKVYAC |
| | | | EVTHQGLSSPVTKSFNRGEC |
| 1627 | ATX-P-3468 | LC Kappa aa | EIVLTQSPGTLSLSPGERATLSCRASQSVSSSYLAWYQQK |
| | | | PGQAPRLLIYGASSRATGIPDRFSGSGSGTDFTLTISRLE |
| | | | PEDFAVYYCQQYGSSPYTFGQGTKLEIKRTVAAPSVFIFP |
| | | | PSDEQLKSGTASVVCLLNNFYPREAKVQWKVDNALQSGNS |
| | | | QESVTEQDSKDSTYSLSSTLTLSKADYEKHKVYACEVTHQ |
| | | | GLSSPVTKSFNRGEC |
| 1628 | ATX-P-3469 | LC Kappa aa | DIQMTQSPSSLSASVGDRVNITCRASQGISNYLAWYQQKP |
| | | | GKVPKLLIYAASTLQSGVPSRFSGSGSGTDFTLTISSLQP |
| | | | EDVASYFCQKYISAPLTFGGGTKVEIKRTVAAPSVFIFPP |
| | | | SDEQLKSGTASVVCLLNNFYPREAKVQWKVDNALQSGNSQ |
| | | | ESVTEQDSKDSTYSLSSTLTLSKADYEKHKVYACEVTHQG |
| | | | LSSPVTKSENRGEC |
| 1629 | ATX-P-3470 | LC Kappa aa | DIQMTQSPSSLSASVGDRVTITCRASQGISNYLAWYQQKP |
| | | | GKVPKLLIYAASTLQSGVPSRFSGSGSGTDFTLTISSLQP |
| | | | EDVASYYCQDYTSAPLTFGGGTKVEIKRTVAAPSVFIFPP |
| | | | SDEQLKSGTASVVCLLNNFYPREAKVQWKVDNALQSGNSQ |
| | | | ESVTEQDSKDSTYSLSSTLTLSKADYEKHKVYACEVTHQG |
| | | | LSSPVTKSENRGEC |
| 1630 | ATX-P-3471 | LC Kappa aa | EIVLTQSPGTLSLSPGERATLSCRASQSVSDSYLAWYQQE |
| | | | PGQAPRLLIYGASSRATGIPDRFSGSGSGTDFTLTISRLE |
| | | | PEDFALYYCQQYDSSPFTFGPGTKVDIKRTVAAPSVFIFP |
| | | | PSDEQLKSGTASVVCLLNNFYPREAKVQWKVDNALQSGNS |
| | | | QESVTEQDSKDSTYSLSSTLTLSKADYEKHKVYACEVTHQ |
| | | | GLSSPVTKSFNRGEC |
| 1631 | ATX-P-3472 | LC Kappa aa | DIVMTQSPDSLAVSLGERATINCKSSQSVLYSSNNKNYLA |
| | | | WYQQKPGQPPKLLIYWASTRESGVPDRFSGSGSGTDFTLT |
| | | | ISSLQAEDVAVYYCQQYYSTPYTFGQGTKLEIKRTVAAPS |
| | | | VFIFPPSDEQLKSGTASVVCLLNNFYPREAKVQWKVDNAL |
| | | | QSGNSQESVTEQDSKDSTYSLSSTLTLSKADYEKHKVYAC |
| | | | EVTHQGLSSPVTKSFNRGEC |
| 1632 | ATX-P-3361 | LC Kappa aa | DIVMTQSPDSLAVSLGERATINCKSSQSVLYSSNNKNYLA |
| | | | WYQQKPGQPPKLLIYWASNRESGVPDRFSGSGSGTDFTLT |
| | | | ISSLQAEDVAVYYCQQYYSTPYTFGQGTKLEIKRTVAAPS |
| | | | VFIFPPSDEQLKSGTASVVCLLNNFYPREAKVQWKVDNAL |
| | | | QSGNSQESVTEQDSKDSTYSLSSTLTLSKADYEKHKVYAC |
| | | | EVTHQGLSSPVTKSFNRGEC |
| 1633 | ATX-P-3366 | LC Kappa aa | DIVMTQSPDSLAVSLGERATINCKSSQSVLYSSNNKNYLA |
| | | | WYQQKPGQPPKLLIYWASNRESGVPDRFSGSGSGTDFTLT |
| | | | ISSLQAEDVAVYYCQQYYSTPYTFGQGTKLEIKRTVAAPS |
| | | | VFIFPPSDEQLKSGTASVVCLLNNFYPREAKVQWKVDNAL |
| | | | QSGNSQESVTEQDSKDSTYSLSSTLTLSKADYEKHKVYAC |
| | | | EVTHQGLSSPVTKSFNRGEC |
| 1634 | ATX-P-3376 | LC Kappa aa | DIVMTQSPDSLAVSLGERATINCKSSQSVLYSSNNKNYLA |
| | | | WYQQKPGQPPKLLIYWASNRESGVPDRFSGSGSGTDFTLT |
| | | | ISSLQAEDVAVYYCQQYYSTPYTFGQGTKLEIKRTVAAPS |
| | | | VFIFPPSDEQLKSGTASVVCLLNNFYPREAKVQWKVDNAL |
| | | | QSGNSQESVTEQDSKDSTYSLSSTLTLSKADYEKHKVYAC |
| | | | EVTHQGLSSPVTKSFNRGEC |
| 1635 | ATX-P-3377 | LC Kappa aa | DIVMTQSPDSLAVSLGERATINCKSSQSVLYSSNNKNYLA |
| | | | WYQQKPGQPPKLLIYWASNRESGVPDRFSGSGSGTDFTLT |
| | | | ISSLQAEDVAVYYCQQYYSTPYTFGQGTKLEIKRTVAAPS |
| | | | VFIFPPSDEQLKSGTASVVCLLNNFYPREAKVQWKVDNAL |
| | | | QSGNSQESVTEQDSKDSTYSLSSTLTLSKADYEKHKVYAC |
| | | | EVTHQGLSSPVTKSFNRGEC |
| 1636 | ATX-P-3418 | LC Kappa aa | DIQMTQSPSSLSASVGDRVTITCRASQTIRNFLNWYQRKP |
| | | | GKAPKILIYAASSLQSGVPSRFSGSGSGTDFTLTISSLQP |
| | | | ADFATYYCQQTYSIPITFGQGTRLEIKRTVAAPSVFIFPP |
| | | | SDEQLKSGTASVVCLLNNFYPREAKVQWKVDNALQSGNSQ |
| | | | ESVTEQDSKDSTYSLSSTLTLSKADYEKHKVYACEVTHQG |
| | | | LSSPVTKSFNRGEC |
| 1637 | ATX-P-3420 | LC Kappa aa | DIQMTQSPSSLSASVGDRVTITCRASQSISRYLNWYQQKP |
| | | | GKAPKLLLYAASSLQSGVPSKFSGSGSGTDFTLTISSLQP |
| | | | EDFATYYCQQSYSSPITFGQGTRLEIKRTVAAPSVFIFPP |
| | | | SDEQLKSGTASVVCLLNNFYPREAKVQWKVDNALQSGNSQ |
| | | | ESVTEQDSKDSTYSLSSTLTLSKADYEKHKVYACEVTHQG |
| | | | LSSPVTKSENRGEC |
| 1638 | ATX-P-3426 | LC Kappa aa | DIVMTQSPLSLPVTPGEPASISCRSSQSLLHSNGYNYLDW |
| | | | YLQKPGQSPQLLIYLGSNRASGVPDRFSGSGSGTDFTLKI |
| | | | SRVEAEDVGVYYCMQTLQTPPTFGQGTKVEIKRTVAAPSV |
| | | | FIFPPSDEQLKSGTASVVCLLNNFYPREAKVQWKVDNALQ |
| | | | SGNSQESVTEQDSKDSTYSLSSTLTLSKADYEKHKVYACE |
| | | | VTHQGLSSPVTKSFNRGEC |
| 1639 | ATX-P-3432 | LC Kappa aa | DIQLTQSPSFLSASVGDRLTITCRASQGISSYLAWYQQKP |
| | | | GKAPKLLIYTASTLQSGVPSRFSGSGSGTEFTLTISSLQP |
| | | | EDFATYYCQQLNGYPPTFGQGTKVEIKRTVAAPSVFIFPP |
| | | | SDEQLKSGTASVVCLLNNFYPREAKVQWKVDNALQSGNSQ |
| | | | ESVTEQDSKDSTYSLSSTLTLSKADYEKHKVYACEVTHQG |
| | | | LSSPVTKSFNRGEC |
| 1640 | ATX-P-3433 | LC Kappa aa | DIQMTQSPSSLSASVGDRVTITCRASQSITSYLNWYQQKP |
| | | | GKAPKLLIFAASSLQSGVPSRFSGSGSGTDFTLTISSLQP |
| | | | EDFATYYCQQSYSTPLTFGGGTKVEIKRTVAAPSVFIFPP |
| | | | SDEQLKSGTASVVCLLNNFYPREAKVQWKVDNALQSGNSQ |
| | | | ESVTEQDSKDSTYSLSSTLTLSKADYEKHKVYACEVTHQG |
| | | | LSSPVTKSFNRGEC |
| 1641 | ATX-P-3438 | LC Kappa aa | DIVMTQSPDSLAVSLGERATINCKSSQSVLYSSNNKNYLA |
| | | | WYQQKPGQPPKLLIYWASTRESGVPDRFSGSGSGTDFTLT |
| | | | ISSLQAEDVAVYYCQQYYSTPRTFGQGTKVEIKRTVAAPS |
| | | | VFIFPPSDEQLKSGTASVVCLLNNFYPREAKVQWKVDNAL |
| | | | QSGNSQESVTEQDSKDSTYSLSSTLTLSKADYEKHKVYAC |
| | | | EVTHQGLSSPVTKSFNRGEC |
| 1642 | ATX-P-3441 | LC Kappa aa | DIQMTQSPSSLSASVGERVTITCRASQSISSYLNWYQQKP |
| | | | GKAPNLLIYAASSFQSGVPSRVSGSGSGTDFTLTISSLQP |
| | | | EDFATYYCQQSYSNPYTFGQGTKLEIKRTVAAPSVFIFPP |
| | | | SDEQLKSGTASVVCLLNNFYPREAKVQWKVDNALQSGNSQ |
| | | | ESVTEQDSKDSTYSLSSTLILSKADYEKHKVYACEVTHQG |
| | | | LSSPVTKSFNRGEC |
| 1643 | ATX-P-3446 | LC Kappa aa | EIVLTQSPGTLSLSPGERATLSCRASQSVSRSYLAWYQQK |
| | | | PGQAPRLLIYGASSRATGIPDRFSGSGSGTDFTLTISRLE |
| | | | PEDFAVYYCQQYGSSPWTFGQGTKVEIKRTVAAPSVFIFP |
| | | | PSDEQLKSGTASVVCLLNNFYPREAKVQWKVDNALQSGNS |
| | | | QESVTEQDSKDSTYSLSSTLTLSKADYEKHKVYACEVTHQ |
| | | | GLSSPVTKSFNRGEC |
| 1644 | ATX-P-3452 | LC Kappa aa | DIVMTQSPLSLPVTPGEPASISCRSSQILLHTNGYNYLDW |
| | | | YLQKPGQSPQLLIYLGSYRASGVPDRFSGSGSGTDFTLKI |
| | | | SRVEAGDVGLYYCMQALQTPLTFGGGTKVEIKRTVAAPSV |
| | | | FIFPPSDEQLKSGTASVVCLLNNFYPREAKVQWKVDNALQ |
| | | | SGNSQESVTEQDSKDSTYSLSSTLTLSKADYEKHKVYACE |
| | | | VTHQGLSSPVTKSENRGEC |

[0207] Human Complement Component 3 (C3), which includes Complement Component 3a (C3a) and Complement Component 3b (C3b), was used to generate the anti-C3 antibodies of the present disclosure (see, e.g., UniProt Accession No.

(SEQ ID NO: 1645)
M0QYC8): ITHRIHWESASLLRSEETKENEGFTVTAEGKGQGTLSV
VTMYHAKAKDQLTCNKFDLKVTIKPAPETGIPSPIFLSSVFLEKRPQ
DAKNTMILEICTRYRGDQDATMSILDISMMTGFAPDTDDLKQLANGV
DRYISKYELDKAFSDRNTLIIYLDKVSHSEDDCLAFKVHQYFNVELI
QPGAVKVYAYYNL.

[0208] Various embodiments of the present disclosure are described herein. Variations of those embodiments may become apparent to those of ordinary skill in the art upon reading the foregoing description. The inventors expect skilled artisans to employ such variations as appropriate, and the inventors intend for the various embodiments of the present disclosure to be practiced otherwise than as specifically described herein. Accordingly, embodiments of the present disclosure include all modifications and equivalents of the subject matter recited in the claims appended hereto as permitted by applicable law. Moreover, any combination of the above-described elements in all possible variations thereof is encompassed by the various embodiments of the present disclosure unless otherwise indicated herein or otherwise clearly contradicted by context.

The application's sequence listing, which the Patent Office published only in electronic form, follows.

SEQUENCE LISTING (1645 sequences)

SEQ ID NO: 1 - skipped

SEQ ID NO: 2 - protein, 5 aa, Synthetic construct
SYGIS

SEQ ID NO: 3 - protein, 5 aa, Synthetic construct
TYGIS

SEQ ID NO: 4 - protein, 5 aa, Synthetic construct
GYYMH

SEQ ID NO: 5 - protein, 5 aa, Synthetic construct
SYYMH

SEQ ID NO: 6 - protein, 5 aa, Synthetic construct
SYYMH

SEQ ID NO: 7 - protein, 5 aa, Synthetic construct
NYYMQ

SEQ ID NO: 8 - protein, 17 aa, Synthetic construct
XIXXXXGXTXXXXXXQX

SEQ ID NO: 9 - protein, 17 aa, Synthetic construct
WISAYNGNTNYAQKLQG

SEQ ID NO: 10 - protein, 17 aa, Synthetic construct
WISAYSGNTHYAQSLQD

SEQ ID NO: 11 - protein, 17 aa, Synthetic construct
WINPNSGGTNYAKKFQG

SEQ ID NO: 12 - protein, 17 aa, Synthetic construct
IINPSGGSTNYAQKFQG

SEQ ID NO: 13 - protein, 17 aa, Synthetic construct
IINPSGGSTSYAQKFQG

SEQ ID NO: 14 - protein, 17 aa, Synthetic construct
IIDPSGGSTTYAQKFQG

SEQ ID NO: 15 - protein, 9 aa, Synthetic construct
DLRGTAFDY

SEQ ID NO: 16 - protein, 16 aa, Synthetic construct
DEGYCSSTGCLNLFDP

SEQ ID NO: 17 - protein, 13 aa, Synthetic construct
GDTIFRLVTPLDY

SEQ ID NO: 18 - protein, 8 aa, Synthetic construct
DQSGGMDV

SEQ ID NO: 19 - protein, 10 aa, Synthetic construct
DPEYSSAFDI

SEQ ID NO: 20 - protein, 11 aa, Synthetic construct
DEGTDRPGWGY

SEQ ID NO: 21 - skipped

SEQ ID NO: 22 - protein, 5 aa, Synthetic construct
SYTMN

SEQ ID NO: 23 - protein, 5 aa, Synthetic construct
SYVMS

SEQ ID NO: 24 - protein, 5 aa, Synthetic construct
SYAMS

SEQ ID NO: 25 - protein, 5 aa, Synthetic construct
TYGIH

SEQ ID NO: 26 - protein, 5 aa, Synthetic construct
RYSMN

SEQ ID NO: 27 - protein, 5 aa, Synthetic construct
DYAMH

SEQ ID NO: 28 - protein, 5 aa, Synthetic construct
DYAMH

SEQ ID NO: 29 - protein, 5 aa, Synthetic construct
DYAMH

SEQ ID NO: 30 - protein, 5 aa, Synthetic construct
DYAMH

SEQ ID NO: 31 - protein, 5 aa, Synthetic construct
DYEMH

SEQ ID NO: 32 - protein, 17 aa, Synthetic construct
XIXXXXXXXXXXDXVXG

SEQ ID NO: 33 - protein, 17 aa, Synthetic construct
SISSSSSYTYYADSVRG

SEQ ID NO: 34 - protein, 17 aa, Synthetic construct
VISVSGGSTFYADSVRG

SEQ ID NO: 35 - protein, 17 aa, Synthetic construct
VISGSGGTTYYADSVKG

SEQ ID NO: 36 - protein, 17 aa, Synthetic construct
VIWHDGSSKNYVDSVTG

SEQ ID NO: 37 - protein, 17 aa, Synthetic construct
YISSSSSTIFHADSVKG

SEQ ID NO: 38 - protein, 17 aa, Synthetic construct
GISWNSGSIGYADSVKG

SEQ ID NO: 39 - protein, 17 aa, Synthetic construct
GISWSGGSIGYADSVKG

SEQ ID NO: 40 - protein, 17 aa, Synthetic construct
GISWNSGSIGYADSVKG

SEQ ID NO: 41 - protein, 17 aa, Synthetic construct
GISWTGGSVGYADPVKG

SEQ ID NO: 42 - protein, 17 aa, Synthetic construct
DISRNSGRIGYADSVKG

SEQ ID NO: 43 - protein, 10 aa, Synthetic construct
SASIAAGMDV

SEQ ID NO: 44 - protein, 10 aa, Synthetic construct
DGLAVAGFDH

SEQ ID NO: 45 - protein, 10 aa, Synthetic construct
RGDYGDYMDV

SEQ ID NO: 46 - protein, 15 aa, Synthetic construct
RGNWNYGFYYYYMDV

SEQ ID NO: 47 - protein, 10 aa, Synthetic construct
GNWNYYYMDV

SEQ ID NO: 48 - protein, 14 aa, Synthetic construct
DRDDGYNYAGVFDY

SEQ ID NO: 49 - protein, 14 aa, Synthetic construct
DREDGYNYGGVFDY

SEQ ID NO: 50 - protein, 14 aa, Synthetic construct
DIGNGYTKGDVFDI

SEQ ID NO: 51 - protein, 14 aa, Synthetic construct
DMGDGYSRNWPFDY

SEQ ID NO: 52 - protein, 10 aa, Synthetic construct
DIWGSGYFDY

SEQ ID NO: 53 - skipped

SEQ ID NO: 54 - protein, 6 aa, Synthetic construct
TSDWWT

SEQ ID NO: 55 - protein, 6 aa, Synthetic construct
TSNWWT

SEQ ID NO: 56 - protein, 6 aa, Synthetic construct
SSNWWT

SEQ ID NO: 57 - protein, 6 aa, Synthetic construct
SSNWWS

SEQ ID NO: 58 - protein, 6 aa, Synthetic construct
SSNWWS

SEQ ID NO: 59 - protein, 6 aa, Synthetic construct
GSHWWS

SEQ ID NO: 60 - protein, 6 aa, Synthetic construct
ISKWWS

SEQ ID NO: 61 - protein, 6 aa, Synthetic construct
SSNWWS

SEQ ID NO: 62 - protein, 6 aa, Synthetic construct
SRNWWS

SEQ ID NO: 63 - protein, 5 aa, Synthetic construct
GYYWS

SEQ ID NO: 64 - protein, 5 aa, Synthetic construct
SHYWS

SEQ ID NO: 65 - protein, 16 aa, Synthetic construct
XXXXXGXXXXXPLSXS

SEQ ID NO: 66 - protein, 16 aa, Synthetic construct
EIYHSGSTNYNPSLKS

SEQ ID NO: 67 - protein, 16 aa, Synthetic construct
EIYHDGSTNYSPSLQS

SEQ ID NO: 68 - protein, 16 aa, Synthetic construct
ETYHDGSTNYNPSLKS

SEQ ID NO: 69 - protein, 16 aa, Synthetic construct
EIYHTGSTNKKPSLKS

SEQ ID NO: 70 - protein, 16 aa, Synthetic construct
EIYHSGSTNYNPSLKS

SEQ ID NO: 71 - protein, 16 aa, Synthetic construct
EIYHTGSTNKNPSLKS

SEQ ID NO: 72 - protein, 16 aa, Synthetic construct
EIYHTGSTNYHPSLKS

SEQ ID NO: 73 - protein, 16 aa, Synthetic construct
EIYHSGTTNYNPSLKS

SEQ ID NO: 74 - protein, 16 aa, Synthetic construct
EIYHGGTTNYNPSLKS

SEQ ID NO: 75 - protein, 16 aa, Synthetic construct
YVHYSGGTKSNPSLKS

SEQ ID NO: 76 - protein, 16 aa, Synthetic construct
YIFYSGNINYNPSLKS

SEQ ID NO: 77 - protein, 5 aa, Synthetic construct
WYFDL

SEQ ID NO: 78 - protein, 5 aa, Synthetic construct
FYIDV

SEQ ID NO: 79 - protein, 5 aa, Synthetic construct
FYFDY

SEQ ID NO: 80 - protein, 12 aa, Synthetic construct
DREGGTTEAFDI

SEQ ID NO: 81 - protein, 13 aa, Synthetic construct
DQLSSGPTDAFDI

SEQ ID NO: 82 - protein, 13 aa, Synthetic construct
DQYTGSPRDAFDI

SEQ ID NO: 83 - protein, 14 aa, Synthetic construct
DELRLGELSPSLDI

SEQ ID NO: 84 - protein, 15 aa, Synthetic construct
DRLRLGESSSDVFDI

SEQ ID NO: 85 - protein, 15 aa, Synthetic construct
GGLRLGELSPNAFDI

SEQ ID NO: 86 - protein, 11 aa, Synthetic construct
ERYEWNSYFDY

SEQ ID NO: 87 - protein, 12 aa, Synthetic construct
DRGGSYSYHFDC

SEQ ID NO: 88 - protein, 7 aa, Synthetic construct
SNXAXWN

SEQ ID NO: 89 - protein, 7 aa, Synthetic construct
SNSAAWN

SEQ ID NO: 90 - protein, 7 aa, Synthetic construct
SNSASWN

SEQ ID NO: 91 - protein, 7 aa, Synthetic construct
SNSAAWN

SEQ ID NO: 92 - protein, 7 aa, Synthetic construct
SNSAAWN

SEQ ID NO: 93 - protein, 7 aa, Synthetic construct
SNSAAWN

SEQ ID NO: 94 - protein, 7 aa, Synthetic construct
SNSAAWN

SEQ ID NO: 95 - protein, 7 aa, Synthetic construct
SNSAAWN

SEQ ID NO: 96 - protein, 7 aa, Synthetic construct
SNSAAWN

SEQ ID NO: 97 - protein, 7 aa, Synthetic construct
SNTAAWN

SEQ ID NO: 98 - protein, 7 aa, Synthetic construct
SNNAAWN

SEQ ID NO: 99 - protein, 7 aa, Synthetic construct
SNSAAWN

SEQ ID NO: 100 - protein, 7 aa, Synthetic construct
SNSAAWN

SEQ ID NO: 101 - protein, 7 aa, Synthetic construct
SNSAAWN

SEQ ID NO: 102 - protein, 18 aa, Synthetic construct
XTXYRSXXXXXXXXSXXS

SEQ ID NO: 103 - protein, 18 aa, Synthetic construct
RTYYRSKWFNNYSVSVKS

SEQ ID NO: 104 - protein, 18 aa, Synthetic construct
TTYYRSKWFNVYAVSVKS

SEQ ID NO: 105 - protein, 18 aa, Synthetic construct
RTYYRSKWFNGYAVSVKS

SEQ ID NO: 106 - protein, 18 aa, Synthetic construct
RTYYRSKWFNDYALSVKS

SEQ ID NO: 107 - protein, 18 aa, Synthetic construct
RTYYRSKWYNDYALSVKS

SEQ ID NO: 108 - protein, 18 aa, Synthetic construct
MTYYRSKWYSVFAVSVKS

SEQ ID NO: 109 - protein, 18 aa, Synthetic construct
KTYYRSKWYNYYALSVKS

SEQ ID NO: 110 - protein, 18 aa, Synthetic construct
RTYYRSKWYSDYPLSVKS

SEQ ID NO: 111 - protein, 18 aa, Synthetic construct
RTYYRSKWYNDYAVSVKS

SEQ ID NO: 112 - protein, 18 aa, Synthetic construct
RTYYRSKWYNAYAVSVKS

SEQ ID NO: 113 - protein, 18 aa, Synthetic construct
RTYYRSKLYSDYAVSVKS

SEQ ID NO: 114 - protein, 18 aa, Synthetic construct
RTYYRSKWYNGYAVSMKS

SEQ ID NO: 115 - protein, 18 aa, Synthetic construct
RTFYRSRWSAAYAASVSS

SEQ ID NO: 116 - protein, 12 aa, Synthetic construct
DLGELLDWYFDL

SEQ ID NO: 117 - protein, 12 aa, Synthetic construct
DRGDLLHWYFDL

SEQ ID NO: 118 - protein, 12 aa, Synthetic construct
DRGELLHWYFDL

SEQ ID NO: 119 - protein, 12 aa, Synthetic construct
EPGIVAPGPFDY

SEQ ID NO: 120 - protein, 12 aa, Synthetic construct
EPGIAAPGPFDY

SEQ ID NO: 121 - protein, 12 aa, Synthetic construct
EGGIVGATPFDY

SEQ ID NO: 122 - protein, 12 aa, Synthetic construct
DGDYYLPSPFDL

SEQ ID NO: 123 - protein, 12 aa, Synthetic construct
DSGIVETTPFDY

SEQ ID NO: 124 - protein, 12 aa, Synthetic construct
DNWNNGGPGFDP

SEQ ID NO: 125 - protein, 10 aa, Synthetic construct
EGGYIYGLDQ

SEQ ID NO: 126 - protein, 10 aa, Synthetic construct
EGGYTYGYDY

SEQ ID NO: 127 - protein, 11 aa, Synthetic construct
EGVGATTGFDY

SEQ ID NO: 128 - protein, 11 aa, Synthetic construct
EGVGSSTGFDY

SEQ ID NO: 129 - skipped

SEQ ID NO: 130 - protein, 11 aa, Synthetic construct
RASQGITTWLA

SEQ ID NO: 131 - protein, 11 aa, Synthetic construct
RTSQGIRNWLA

SEQ ID NO: 132 - protein, 11 aa, Synthetic construct
RASQSFAGWLA

SEQ ID NO: 133 - protein, 11 aa, Synthetic construct
RASQGISSWLA

SEQ ID NO: 134 - protein, 11 aa, Synthetic construct
RASQGISSWLA

SEQ ID NO: 135 - protein, 11 aa, Synthetic construct
RASQGVNNWLA

SEQ ID NO: 136 - protein, 11 aa, Synthetic construct
RASQGISSWLA

SEQ ID NO: 137 - protein, 11 aa, Synthetic construct
RASQGISSWLT

SEQ ID NO: 138 - protein, 11 aa, Synthetic construct
RASKGISIWLA

SEQ ID NO: 139 - protein, 11 aa, Synthetic construct
RASQGIRNDLG

SEQ ID NO: 140 - protein, 11 aa, Synthetic construct
RASQGIRKDLG

SEQ ID NO: 141 - protein, 11 aa, Synthetic construct
RASQDIRNDLG

SEQ ID NO: 142 - protein, 11 aa, Synthetic construct
RASQSINTYLN

SEQ ID NO: 143 - protein, 11 aa, Synthetic construct
RASQNIGSYLN

SEQ ID NO: 144 - protein, 10 aa, Synthetic construct
RASQSINYLN

SEQ ID NO: 145 - protein, 11 aa, Synthetic construct
RASQSIRSYLN

SEQ ID NO: 146 - protein, 11 aa, Synthetic construct
RASQSISSYLD

SEQ ID NO: 147 - protein, 11 aa, Synthetic construct
RASQNINNYLN

SEQ ID NO: 148 - protein, 11 aa, Synthetic construct
RASQSISSYLN

SEQ ID NO: 149 - protein, 11 aa, Synthetic construct
RASQSISTWLA

SEQ ID NO: 150 - protein, 11 aa, Synthetic construct
RASQSVNSWLA

SEQ ID NO: 151 - protein, 11 aa, Synthetic construct
RASQNIITWLA

SEQ ID NO: 152 - skipped

SEQ ID NO: 153 - protein, 7 aa, Synthetic construct
GASSLES

SEQ ID NO: 154 - protein, 7 aa, Synthetic construct
AASSLQT

SEQ ID NO: 155 - protein, 7 aa, Synthetic construct
AASTLQS

SEQ ID NO: 156 - protein, 7 aa, Synthetic construct
AASSLQS

SEQ ID NO: 157 - protein, 7 aa, Synthetic construct
AASSLQS

SEQ ID NO: 158 - protein, 7 aa, Synthetic construct
AASSLLS

SEQ ID NO: 159 - protein, 7 aa, Synthetic construct
AASSLQS

SEQ ID NO: 160 - protein, 7 aa, Synthetic construct
AASSLQG

SEQ ID NO: 161 - protein, 7 aa, Synthetic construct
AASSLQS

SEQ ID NO: 162 - protein, 7 aa, Synthetic construct
AASSLQS

SEQ ID NO: 163 - protein, 7 aa, Synthetic construct
TASTLQS

SEQ ID NO: 164 - protein, 7 aa, Synthetic construct
AASSLQS

SEQ ID NO: 165 - protein, 7 aa, Synthetic construct
AASSLQS

SEQ ID NO: 166 - protein, 7 aa, Synthetic construct
ATSTLQS

SEQ ID NO: 167 - protein, 7 aa, Synthetic construct
AASSLQS

SEQ ID NO: 168 - protein, 7 aa, Synthetic construct
AASSLQS

SEQ ID NO: 169 - protein, 7 aa, Synthetic construct
AASSLQS

SEQ ID NO: 170 - protein, 7 aa, Synthetic construct
AASSLQS

SEQ ID NO: 171 - protein, 7 aa, Synthetic construct
AASSLQS

SEQ ID NO: 172 - protein, 7 aa, Synthetic construct
KASGLES

SEQ ID NO: 173 - protein, 7 aa, Synthetic construct
KASNLEG

SEQ ID NO: 174 - protein, 7 aa, Synthetic construct
KASSLES

SEQ ID NO: 175 - protein, 9 aa, Synthetic construct
QQANSFPWT

SEQ ID NO: 176 - protein, 9 aa, Synthetic construct
QQANSFPYT

SEQ ID NO: 177 - protein, 9 aa, Synthetic construct
QQANSFPLT

SEQ ID NO: 178 - protein, 9 aa, Synthetic construct
QQNYRTPIT

SEQ ID NO: 179 - protein, 9 aa, Synthetic construct
QQANSFPPT

SEQ ID NO: 180 - protein, 9 aa, Synthetic construct
QQANSFPIT

SEQ ID NO: 181 - protein, 9 aa, Synthetic construct
QQANSFPPT

SEQ ID NO: 182 - protein, 9 aa, Synthetic construct
QQANSFPPT

SEQ ID NO: 183 - protein, 9 aa, Synthetic construct
QQANSFPPT

SEQ ID NO: 184 - protein, 9 aa, Synthetic construct
LHFNSYPFT

SEQ ID NO: 185 - protein, 9 aa, Synthetic construct
LQYNNYPFT

SEQ ID NO: 186 - protein, 9 aa, Synthetic construct
LQYNNYPFT

SEQ ID NO: 187 - protein, 9 aa, Synthetic construct
QHSFTTPFT

SEQ ID NO: 188 - protein, 9 aa, Synthetic construct
QQSFIIPFT

SEQ ID NO: 189 - protein, 9 aa, Synthetic construct
QQSYSTPIT

SEQ ID NO: 190 - protein, 9 aa, Synthetic construct
QQSYRTPVT

SEQ ID NO: 191 - protein, 9 aa, Synthetic construct
QQSYSTPLT

SEQ ID NO: 192 - protein, 9 aa, Synthetic construct
QQSYSTPLT

SEQ ID NO: 193 - protein, 9 aa, Synthetic construct
QETYSVPLT

SEQ ID NO: 194 - protein, 9 aa, Synthetic construct
QQYNSFSLI

SEQ ID NO: 195 - protein, 8 aa, Synthetic construct
QQYDTSWT

SEQ ID NO: 196 - protein, 9 aa, Synthetic construct
QQYSSYSYT

SEQ ID NO: 197 - protein, 16 aa, Synthetic construct
RSSQXLLHSXGYNXLD

SEQ ID NO: 198 - protein, 16 aa, Synthetic construct
RSSQSLLHSTGYNFLD

SEQ ID NO: 199 - protein, 16 aa, Synthetic construct
RSSQRLLHSSGYNYLD

SEQ ID NO: 200 - protein, 7 aa, Synthetic construct
LXSXRAS

SEQ ID NO: 201 - protein, 7 aa, Synthetic construct
LASNRAS

SEQ ID NO: 202 - protein, 7 aa, Synthetic construct
LGSSRAS

SEQ ID NO: 203 - protein, 9 aa, Synthetic construct
MQXLQTPXT

SEQ ID NO: 204 - protein, 9 aa, Synthetic construct
MQALQTPYT

SEQ ID NO: 205 - protein, 9 aa, Synthetic construct
MQGLQTPPT

SEQ ID NO: 206 - protein, 13 aa, Synthetic construct
RASQXXXXXXXXA

SEQ ID NO: 207 - protein, 11 aa, Synthetic construct
RASQSVSSNLA

SEQ ID NO: 208 - protein, 11 aa, Synthetic construct
RASQSVSSNLA

SEQ ID NO: 209 - protein, 12 aa, Synthetic construct
RASQSVSSSYLA

SEQ ID NO: 210 - protein, 11 aa, Synthetic construct
RASQSVSSNLA

SEQ ID NO: 211 - protein, 12 aa, Synthetic construct
RASQNVRGSYLA

SEQ ID NO: 212 - protein, 12 aa, Synthetic construct
RASQSVSSSYLA

SEQ ID NO: 213 - protein, 12 aa, Synthetic construct
RASQSVRNSYVA

SEQ ID NO: 214 - protein, 12 aa, Synthetic construct
RASQSVSSSYLA

SEQ ID NO: 215 - protein, 12 aa, Synthetic construct
RASQTIRSSYLA

SEQ ID NO: 216 - protein, 7 aa, Synthetic construct
GASXRAT

SEQ ID NO: 217 - protein, 7 aa, Synthetic construct
GASTRAT

SEQ ID NO: 218 - protein, 7 aa, Synthetic construct
GASTRAT

SEQ ID NO: 219 - protein, 7 aa, Synthetic construct
GASSRAT

SEQ ID NO: 220 - protein, 7 aa, Synthetic construct
GASSRAT

SEQ ID NO: 221 - protein, 7 aa, Synthetic construct
GASNRAT

SEQ ID NO: 222 - protein, 7 aa, Synthetic construct
GASSRAT

SEQ ID NO: 223 - protein, 7 aa, Synthetic construct
GASSRAT

SEQ ID NO: 224 - protein, 7 aa, Synthetic construct
GASSRAT

SEQ ID NO: 225 - protein, 7 aa, Synthetic construct
GASSRAT

SEQ ID NO: 226 - skipped

SEQ ID NO: 227 - protein, 8 aa, Synthetic construct
QQYDNWRT

SEQ ID NO: 228 - protein, 8 aa, Synthetic construct
QQYDNWRT

SEQ ID NO: 229 - protein, 9 aa, Synthetic construct
QQYGSSPWT

SEQ ID NO: 230 - protein, 8 aa, Synthetic construct
QQYGSSFT

SEQ ID NO: 231 - protein, 8 aa, Synthetic construct
QQYGSSYT

SEQ ID NO: 232 - protein, 9 aa, Synthetic construct
QHYGNSPLT

SEQ ID NO: 233 - protein, 9 aa, Synthetic construct
QQYGNSPLT

SEQ ID NO: 234 - protein, 8 aa, Synthetic construct
QQYGRSVT

SEQ ID NO: 235 - protein, 8 aa, Synthetic construct
QQYGRSII

SEQ ID NO: 236 - protein, 17 aa, Synthetic construct
KSSQSVLYSSNNKNYLA

SEQ ID NO: 237 - protein, 17 aa, Synthetic construct
KSSQSVLYSSNNKNYLA

SEQ ID NO: 238 - protein, 17 aa, Synthetic construct
KSSQSVLYSSNNKNYLA

SEQ ID NO: 239 - protein, 17 aa, Synthetic construct
KSSQSVLYSSNNKNYLA

SEQ ID NO: 240 - protein, 17 aa, Synthetic construct
KSSQSVLYSSNNKNYLA

SEQ ID NO: 241 - protein, 17 aa, Synthetic construct
KSSQSVLYSSNNKNYLA

SEQ ID NO: 242 - protein, 17 aa, Synthetic construct
KSSQSVLYSSNNKNYLA

SEQ ID NO: 243 - protein, 17 aa, Synthetic construct
KSSQSVLYSSNNKNYLA

SEQ ID NO: 244 - protein, 7 aa, Synthetic construct
WASXRES

SEQ ID NO: 245 - protein, 7 aa, Synthetic construct
WASTRES

SEQ ID NO: 246 - protein, 7 aa, Synthetic construct
WASTRES

SEQ ID NO: 247 - protein, 7 aa, Synthetic construct
WASTRES

SEQ ID NO: 248 - protein, 7 aa, Synthetic construct
WASTRES

SEQ ID NO: 249 - protein, 7 aa, Synthetic construct
WASPRES

SEQ ID NO: 250 - protein, 7 aa, Synthetic construct
WASTRES

SEQ ID NO: 251 - protein, 7 aa, Synthetic construct
WASNRES

SEQ ID NO: 252 - protein, 10 aa, Synthetic construct
QQXXXXPXXT

SEQ ID NO: 253 - protein, 10 aa, Synthetic construct
QQYGSSPMYT

SEQ ID NO: 254 - protein, 9 aa, Synthetic construct
QQFYNTPYT

SEQ ID NO: 255 - protein, 9 aa, Synthetic construct
QQYYSSPRT

SEQ ID NO: 256 - protein, 9 aa, Synthetic construct
QQYYSTPYT

SEQ ID NO: 257 - protein, 9 aa, Synthetic construct
QQYYSIPRT

SEQ ID NO: 258 - protein, 9 aa, Synthetic construct
QQYYSTPYT

SEQ ID NO: 259 - protein, 9 aa, Synthetic construct
QQYYSTPYT

SEQ ID NO: 260 - protein, 125 aa, Synthetic construct
QVQLVQSGAEVKKPGASVKVSCKASGYTFTTYGISWVRQAPGQGLEWMGWISAYSGNTHYAQSLQDRVTMTTDTSTSTAYMEVRSLRSDDTAVYYCAKDEGYCSSTGCLNLFDPWGQGTLVTVSS

SEQ ID NO: 261 - protein, 118 aa, Synthetic construct
QVQLVQSGAEVKKPGASVKVSCKASGYTFTSYGISWVRQAPGQGLEWMGWISAYNGNTNYAQKLQGRVTMTTDTSTSTAYMELRSLRSDDTAIYYCTRDLRGTAFDYWGQGTPVTVSS

SEQ ID NO: 262 - protein, 122 aa, Synthetic construct
QVQLVQSGAEVKKPGASVKVSCKASGYTFTGYYMHWVRQAPGQGLEWMGWINPNSGGTNYAKKFQGRVTMTRDTSISTAYMELSRLRSDDTAVYYCARGDTIFRLVTPLDYWGQGTLVTVSS

SEQ ID NO: 263 - protein, 120 aa, Synthetic construct
QVQLVQSGAEVKKPGASVKVSCKASGYTFTNYYMQWVRQAPGQGLEWLGIIDPSGGSTTYAQKFQGRVTMTRDTSTSTVHMELRSLRSEDTAVYYCARDEGTDRPGWGYWGQGTLVTVSS

SEQ ID NO: 264 - protein, 117 aa, Synthetic construct
QVQLVQSGAEVKKPGASVKVSCKASGYTFTSYYMHWVRQAPGQGLEWMGIINPSGGSTNYAQKFQGRLTMTRDTSTNTVYMELSSLRSEDTAVYYCATDQSGGMDVWGKGTTVTVSS

SEQ ID NO: 265 - protein, 119 aa, Synthetic construct
QVQLVQSGAEVKKPGASVKVSCKASGYTFTSYYMHWVRQAPGQGLEWMGIINPSGGSTSYAQKFQGRVTMTRDTSTNTVYMELSSLRSEDTAVYYCARDPEYSSAFDIWGQGTMVTVSS

SEQ ID NO: 266 - DNA, 375 bp, Synthetic construct
  source 1..375: mol_type = other DNA
caggttcagctggtgcagtctggagctgaggtgaagaagcctggggcctcagtgaaggtctcctgcaaggcttctggttacacctttaccacctatggtatcagctgggtgcgacaggcccctggacaagggcttgagtggatgggatggatcagcgcttacagtggtaacacacactatgcacagagcctccaggacagagtcaccatgaccacagacacatccacgagtacagcctacatggaggtgaggagcctgagatctgacgacacggccgtgtattactgtgcgaaagatgagggatattgtagtagtaccggctgcttaaacttgttcgacccctggggccagggaaccctggtcaccgtctcctca

SEQ ID NO: 267 - DNA, 354 bp, Synthetic construct
  source 1..354: mol_type = other DNA
caggttcagctggtgcagtctggagctgaggtgaagaagcctggggcctcagtgaaggtctcctgcaaggcttctggttacacctttaccagctatggtatcagctgggtgcgacaggcccctggacaagggcttgagtggatgggatggatcagcgcttacaatggtaacacaaactatgcacagaagctccagggcagagtcaccatgaccacagacacatccacgagcacagcctacatggagctgaggagcctgagatctgacgacactgccatttattactgtacgagagatctacgtggaactgcctttgactactggggccagggaaccccggtcactgtctcctca

SEQ ID NO: 268 - DNA, 366 bp, Synthetic construct
  source 1..366: mol_type = other DNA
caggtgcagctggtgcaatctggggctgaggtgaagaagcctggggcctcagtgaaggtctcctgcaaggcttctggatacaccttcaccggctactatatgcactgggtgcgacaggcccctggacaaggacttgagtggatgggatggatcaaccctaacagtggtggcacaaactatgcaaagaagtttcagggcagggtcaccatgaccagggacacgtccatcagcacagcctacatggagttgagcaggctgagatctgacgacacggccgtgtattactgtgcgagaggggatacgatttttcgactggttacccctcttgactactggggccagggaaccctggtcaccgtctcctca

SEQ ID NO: 269 - DNA, 360 bp, Synthetic construct
  source 1..360: mol_type = other DNA
caggtgcagctggtgcaatctggagctgaggtgaagaagcctggggcctcagtgaaggtttcctgcaaggcatctggatacaccttcaccaactactatatgcagtgggtgcgacaggcccctggacaagggcttgagtggctgggaataatcgaccctagtggtggtagcacaacctatgcacagaagttccagggcagagtcaccatgaccagggacacgtccacgagcacagtccacatggagctgagaagtctgagatctgaggacacggccgtctattattgcgcgagagatgagggaacagatcgtcccgggtggggctactggggccagggaaccctggtcactgtctcctca

SEQ ID NO: 270 - DNA, 351 bp, Synthetic construct
  source 1..351: mol_type = other DNA
caggtgcagctggtgcaatctggggctgaggtgaagaagcctggggcctcagtgaaggtttcctgcaaggcatctggatacaccttcaccagctactatatgcactgggtgcgacaggcccctggacaagggcttgagtggatgggaataatcaaccctagtggtggtagcacaaactacgcacagaagttccagggcagactcaccatgaccagggacacgtccacgaacacagtctacatggaactgagtagcctgagatctgaggacacggccgtgtattactgtgcgacagatcaaagtggggggatggacgtctggggcaaagggaccacggtcaccgtctcctca

SEQ ID NO: 271 - DNA, 357 bp, Synthetic construct
  source 1..357: mol_type = other DNA
caggtgcagctggtgcaatctggggctgaggtgaagaagcctggggcctcagtgaaggtttcctgcaaggcatctggatacaccttcaccagttactatatgcactgggtgcgacaggcccctggacaagggcttgagtggatgggaataatcaaccctagtggtggtagcacaagctacgcacagaagttccagggcagagtcaccatgaccagggacacgtcaacgaacacagtctacatggagctgagcagccttcgatctgaggacacggccgtgtattactgtgcgagagatcccgagtatagcagtgcttttgatatctggggacaagggacaatggtcaccgtctcctca

SEQ ID NO: 272 - protein, 107 aa, Synthetic construct
DIQMTQSPSSLSASVGDRVTITCRASQNIGSYLNWYQQKPGNAPKLLIYATSTLQSGVPSRFSGSGSGTDFTLIISSLHPEDFTVYYCQQSFIIPFTFGPGTKVDIK

SEQ ID NO: 273 - protein, 107 aa, Synthetic construct
DIQMTQSPSSLSASVGDRVTITCRASQSINTYLNWYQQKPGKAPKLLIYAASSLQSGVPSRFSGSGSGTDFTLTISSLQPEDFATYSCQHSFTTPFTFGPGTKLEIK

SEQ ID NO: 274 - protein, 108 aa, Synthetic construct
EIVLTQSPGTLSLSPGERATLSCRASQSVSSSYLAWYQQKPGQAPRLLIYGASSRATGIPDRFSGSGSGTQFTLTISSLQSEDFAVYYCQQYGSSPWTFGQGTKVDIK

SEQ ID NO: 275 - protein, 107 aa, Synthetic construct
DIQMTQSPSSLSASIGDRVTITCRASQSISSYLDWYQRKSGKAPKLLIYAASSLQSGVPSRFSGSGSGTDFTLTISSLQPEDFATYYCQQSYSTPLTFGGGTKVDIK

SEQ ID NO: 276 - protein, 107 aa, Synthetic construct
DIQMTQSPSSLSASVGDRVTITCRASQSINIYLNWYQQKPEKDPKLLIYAASSLQSGVPSRFSGSGSGTDFTLTISNLQPEDFATYYCQQSYSTPITFGQGTRLEIK

SEQ ID NO: 277 - protein, 107 aa, Synthetic construct
DIQMTQSPSSLSASVGDRGTITCRASQSIRSYLNWYQQKPGKAPKLLIYAASSLQSGVPSRFSGSGSGTDFTLTISSLQPEDFATYYCQQSYRTPVTFGPGTKVDIK

SEQ ID NO: 278 - DNA, 321 bp, Synthetic construct
  source 1..321: mol_type = other DNA
gacatccagatgacccagtctccgtcctccctgtctgcatctgtaggagacagagtcaccatcacttgccgggcaagtcagaacattggcagttatttaaattggtatcagcagaaaccagggaatgcccctaaactcctgatctatgctacatccactttgcaaagtggggtcccatcaaggttcagtggcagtggatctgggacagatttcactctcatcatcagcagtctgcaccctgaagattttacagtttattactgtcaacagagtttcattatcccattcactttcggccctgggaccaaagtggatatcaaa

SEQ ID NO: 279 - DNA, 321 bp, Synthetic construct
  source 1..321: mol_type = other DNA
gacatccagatgactcagtctccatcctccctgtctgcatctgttggagacagagtcaccatcacttgccgggcaagtcagagcattaacacctatttaaattggtatcagcagaaaccagggaaagcccctaagctcctgatctatgctgcatccagtttgcaaagtggggtcccatcaaggttcagtggcagtggatctgggacagatttcactctcaccatcagcagtctgcaacctgaagattttgcaacttactcctgtcaacatagtttcactaccccattcactttcggccctgggaccaagctggaaatcaaa

SEQ ID NO: 280 - DNA, 324 bp, Synthetic construct
  source 1..324: mol_type = other DNA
gaaattgtgttgacgcagtctccaggcaccctgtctttgtctccaggggaaagagccaccctctcctgcagggccagtcagagtgttagcagcagctacttagcctggtaccagcagaaacctggccaggctcccaggctcctcatctatggtgcatccagtagggccactggcatcccagacaggttcagtggcagtgggtctgggacacagttcactctcaccatcagcagcctgcagtctgaagattttgcagtttattactgtcagcagtatggtagctcaccgtggacgttcggccaagggaccaaagtggatatcaaa

SEQ ID NO: 281 - DNA, 321 bp, Synthetic construct
  source 1..321: mol_type = other DNA
gacatccagatgacccagtctccatcctccctgtctgcatctattggagacagagtcaccatcacttgccgggcaagtcagagcattagcagctatttagattggtatcagcggaaatcagggaaagcccctaaactcctgatctatgctgcatccagtttgcaaagtggggtcccatcaaggttcagtggcagtggatctgggacagatttcactctcaccatcagcagtctgcaacctgaagattttgcaacttactactgtcaacagagttacagtaccccgctcactttcggcggagggaccaaagtggatatcaaa

SEQ ID NO: 282 - DNA, 321 bp, Synthetic construct
  source 1..321: mol_type = other DNA
gacatccagatgacccagtctccatcctccctgtctgcatctgtaggagacagagtcaccatcacttgccgggcaagtcagagcattaatatctatttaaattggtatcagcagaaaccagagaaagaccctaagctcctgatctatgctgcgtccagtttgcaaagtggggtcccatcaaggttcagtggcagtggatctgggacagatttcactctcaccatcagcaatctgcaacctgaagattttgcaacttactactgtcaacagagttacagtaccccgatcaccttcggccaagggacacgactggagattaaa

SEQ ID NO: 283 - DNA, 321 bp, Synthetic construct
  source 1..321: mol_type = other DNA
gacatccagatgacacagtctccatcctccctgtctgcatctgtaggagacagaggcaccatcacttgccgggcaagtcagagcattagaagttatttaaattggtatcagcagaaaccagggaaagcccctaaactcctgatctatgctgcatccagtttgcaaagtggggtcccatcaaggttcagtggcagtggatctgggacagatttcactctcaccatcagcagtctgcaacctgaagattttgcaacttactactgtcaacagagttacagaaccccagtcactttcggccctgggaccaaagtggatatcaaa

SEQ ID NO: 284 - protein, 119 aa, Synthetic construct
EVQLVESGGGLVKPGGSLRLSCAASGFTFSSYTMNWVRQAPGKGLEWVSSISSSSSYTYYADSVRGRFTISRDNAKNSLYLQMSSLRAEDTAVYYCARSASIAAGMDVWGKGTTVTVSS

SEQ ID NO: 285 - protein, 119 aa, Synthetic construct
EVQLVESGGGLVQPGGSLRLSCAASGFPFSSYVMSWVRQAPGKGLEWVSVISVSGGSTFYADSVRGRFTISRDNSKNTLYLQVYSLRAEDTAVYYCAKDGLAVAGFDHWGQGTLVTVSS

SEQ ID NO: 286 - protein, 119 aa, Synthetic construct
EVQLVESGGGLVQRGGSLRLSCVASGFTFSSYAMSWVRQAPGKGLEWVSVISGSGGTTYYADSVKGRFTISRDDSKKTLYLQMNSLRAEDTAVYYCAKRGDYGDYMDVWGKGTTVTVSS

SEQ ID NO: 287 - protein, 124 aa, Synthetic construct
QVQLVESGGGVVQPGRSLRLSCAASGFTFNTYGIHWVRQAPGKGLEWVAVIWHDGSSKNYVDSVTGRFTISRDNSKNTVYLQMNSLRAEDTAVYYCARRGNWNYGFYYYYMDVWGKGTTVTVSS

SEQ ID NO: 288 - protein, 119 aa, Synthetic construct
EVQLVESGGGLVQPGGSLRLSCAASGFTFSRYSMNWVRQAPGKGLEWVSYISSSSSTIFHADSVKGRFTISRDNAKNSLYLQMNSLRDEDTAVYYCARGNWNYYYMDVWGKGTTVTVSS

SEQ ID NO: 289 - protein, 123 aa, Synthetic construct
EVQLVESGGGLAQFGRSLRLSCAASGFTFDDYAMHWLRQAPGMGLEWVSGISWNSGSIGYADSVKGRFTIARDNAKNSVHLQMNSLRAEDTALYYCAKDIGNGYTKGDVFDIWGQGTMVTVSS

SEQ ID NO: 290 - protein, 119 aa, Synthetic construct
EVQLVESGGGLVQPGRSLRLSCTASGFTFDDYEMHWVRQAPGKGLEWVSDISRNSGRIGYADSVKGRFTISRDNAKNSLYLQMNSLRAEDTALYYCAKDIWGSGYFDYWGQGILVTVSS

SEQ ID NO: 291 - protein, 123 aa, Synthetic construct
EVQLVESGGGLVQPGRSLRLSCAASGFTFEDYAMHWVRQAPGKGLEWVSGISWNSGSIGYADSVKGRFTISRDNAKKSLYLQMNSLRAEDTALYYCTKDRDDGYNYAGVFDYWGQGTLVTVSS

SEQ ID NO: 292 - protein, 123 aa, Synthetic construct
EVQLVESGGGLVQPGRSLRLSCAASGFSFDDYAMHWVRQVPGKGLEWVSGISWTGGSVGYADPVKGRFTISRDNAKNSLYLQMNSLRPEDTALYYCAKDMGDGYSRNWPFDYWGQGTLVTVSS

SEQ ID NO: 293 - protein, 123 aa, Synthetic construct
EVQLVESGGGLVQPGRSLRLSCAASGFTFDDYAMHWVRQVPGRGLEWVSGISWSGGSIGYADSVKGRFTISRDNSKNSLYLQMNSLRAEDTALYYCTKDREDGYNYGGVFDYWGQGTLVTVSS

SEQ ID NO: 294 - DNA, 357 bp, Synthetic construct
  source 1..357: mol_type = other DNA
gaggtgcagctggtggagtctgggggaggcctggtcaagcctggggggtccctgagactctcctgtgcagcctctggattcaccttcagtagctataccatgaactgggtccgccaggctccagggaaggggctggagtgggtgtcatccattagtagtagtagtagttacacatactacgcagactcagtgaggggccgattcaccatctccagagacaacgccaagaactcactgtatctgcaaatgagcagcctgagagccgaggacacagctgtgtattactgtgcgagatcggcgagtatagcagctgggatggacgtctggggcaaagggaccacggtcaccgtctcctca

SEQ ID NO: 295 - DNA, 357 bp, Synthetic construct
  source 1..357: mol_type = other DNA
gaggtgcagctggtggagtctgggggaggcttggtacagccgggggggtccctgagactctcctgtgcagcctctggattcccctttagcagctatgtcatgagctgggtccgccaggctccagggaaggggctggagtgggtctcagttataagtgttagtggtggtagtacattctacgcagactccgtgaggggccggttcaccatctccagagacaattccaagaacacgctgtatctgcaagtgtacagcctgcgagccgaggacacggccgtatattactgtgcgaaagatggtttggcagtggctggttttgaccactggggccagggaaccctggtcaccgtctcctca

SEQ ID NO: 296 - DNA, 357 bp, Synthetic construct
  source 1..357: mol_type = other DNA
gaggtgcagctggtggagtctgggggaggcttggtacagcggggggggtccctgagactctcctgtgtagcctctggattcacctttagtagctatgccatgagctgggtccgccaggctccagggaaggggctggagtgggtctcagttattagtggtagtggtggtaccacatactacgcagactccgtgaagggccggttcaccatctccagagacgattccaagaagacactgtatctgcaaatgaacagcctgagagccgaggacacggccgtatattattgtgcgaaaaggggtgactacggggactacatggacgtctggggcaaagggaccacggtcaccgtctcctca

SEQ ID NO: 297 - DNA, 372 bp, Synthetic construct
  source 1..372: mol_type = other DNA
caggtgcagctggtggagtctgggggaggcgtggtccagcctgggaggtccctgagactctcctgtgcagcgtctggattcaccttcaatacctatggcatccactgggtccgccaggctccaggcaagggactggagtgggtggcagttatatggcatgatggaagtagtaaaaactatgtagactccgtgacgggccgattcaccatctccagagacaattccaagaacacggtgtatctgcaaatgaacagcctgagagccgaggacacggctgtttattactgtgcgagaaggggtaactggaactacggcttctactactactacatggacgtctggggcaaaggaaccacggtcaccgtctcctca

SEQ ID NO: 298 - DNA, 357 bp, Synthetic construct
  source 1..357: mol_type = other DNA
gaggtgcagctggtggagtctgggggaggtttggtacagcctggggggtccctgagactctcctgtgcagcctctggattcaccttcagtagatatagcatgaactgggtccgccaggctccagggaaggggctggagtgggtttcatacattagtagtagtagtagtaccattttccatgcagactctgtgaagggccgattcaccatctccagagacaatgccaagaactcactgtacctgcaaatgaacagcctgagagacgaggacacggctgtgtattactgtgcgagagggaactggaactactactacatggacgtctggggcaaagggaccacggtcaccgtctcctca

SEQ ID NO: 299 - DNA, 369 bp, Synthetic construct
  source 1..369: mol_type = other DNA
gaagtgcagctggtggagtctgggggaggcttggcacagtttggcaggtccctgagactctcctgtgcagcctctggattcacctttgatgattatgccatgcactggctccggcaagctccagggatgggcctggagtgggtctcaggtattagttggaatagcgggagcataggctatgcggactctgtgaagggccgattcaccatcgccagagacaacgccaagaactccgtgcatctgcaaatgaacagtctgagagctgaggacacggccttgtattactgtgcaaaagatataggaaatggatatacgaagggtgatgtttttgatatctggggacaagggacaatggtcaccgtctcttca

SEQ ID NO: 300 - DNA, 357 bp, Synthetic construct
  source 1..357: mol_type = other DNA
gaagtgcagctggtggagtctgggggaggcttggtacagcctggcaggtccctgagactctcctgtacagcctctggattcacatttgatgattatgaaatgcactgggtccggcaagctccagggaagggcctggagtgggtctcagatattagtcggaacagtggtagaataggctatgcggactctgtgaagggccgattcaccatttccagagacaacgccaagaactccctgtatctacaaatgaacagtctgagagctgaggacacggccttgtattactgtgcaaaagatatttggggatcggggtactttgactattggggccagggaatcctggtcaccgtctcctca

SEQ ID NO: 301 - DNA, 369 bp, Synthetic construct
  source 1..369: mol_type = other DNA
gaagtgcagctggtggagtccgggggaggcttggtacaacctggcaggtccctgagactctcctgtgcagcctctggattcacctttgaagattatgccatgcactgggtccggcaagctccagggaagggcctggagtgggtctcaggtattagttggaatagtggtagcataggctatgcggactctgtgaagggccgattcaccatctccagagacaacgccaagaaatccctgtatctgcaaatgaacagtctgagagctgaggacacggccttatattactgtacaaaagatagagatgatggctacaactatgcgggggtctttgactactggggccagggaaccctggtcactgtctcctca

SEQ ID NO: 302 - DNA, 369 bp, Synthetic construct
  source 1..369: mol_type = other DNA
gaagtgcagctggtggagtctgggggaggcttggtacagcctggcaggtccctgagactctcctgtgcagcctctgggttcagttttgatgattatgccatgcactgggtccggcaagttccagggaagggcctggaatgggtctcaggtattagttggactggtggtagcgtaggctatgcggaccccgtgaagggccgattcaccatctccagagacaacgccaagaactccctgtatctgcaaatgaacagtctgagacctgaggacacggccttgtattactgtgcaaaagatatgggagacgggtatagcagaaactggccctttgactactggggccagggaaccctggtcaccgtctcctca

SEQ ID NO: 303 - DNA, 369 bp, Synthetic construct
  source 1..369: mol_type = other DNA
gaagtgcagctggtggagtctgggggaggcttggtacagcctggcaggtccctgagactctcctgtgcagcctctggattcacctttgatgattatgccatgcactgggtccggcaagttccagggaggggcctggagtgggtctcaggtattagttggagtggtggcagcataggctatgcggactctgtgaagggccgattcaccatctccagagacaactccaagaactccctgtatctgcaaatgaacagtctgagagctgaggacacggccttgtattactgtacaaaagatagagaagatggatacaactatgggggggtctttgactactggggccagggaaccctggtcaccgtctcctca

SEQ ID NO: 304 - protein, 112 aa, Synthetic construct
DIVMTQSPLSLPVTPGEPASISCRSSQSLLHSTGYNFLDWYLQKPGLSPQLLIYLASNRASGVPDRFSGSGSGTDFTLKISRVEAEDVGVYYCMQALQTPYTFGQGTKLEIK

SEQ ID NO: 305 - protein, 107 aa, Synthetic construct
DIQMTQSPSTLSASVGDRVTITCRASQSISTWLAWYQQKPGKAPKLLIHKASGLESGVPSRFSGSGSGTEFTLTISSLQPDDFATYYCQQYNSFSLIFGGGTRVEIK

SEQ ID NO: 306 - protein, 107 aa, Synthetic construct
DIQMTQSPSSVSASVGDRVTITCRASQGITTWLAWYQQKPGKAPKLLIFGASSLESGVPSRFSGSGSGTDFTLTISSLQPEDFATYYCQQANSFPWTFGQGTKVEIK

SEQ ID NO: 307 - protein, 112 aa, Synthetic construct
DIVMTQSPLSLPVTPGEPASISCRSSQRLLHSSGYNYLDWYLQKPGQSPQLLIYLGSSRASGVPDRFSGSGSGTDFTLKISRVEAEDVGVYYCMQGLQTPPTFGQGTKVEIK

SEQ ID NO: 308 - protein, 106 aa, Synthetic construct
DIQMTQSPSTLSASVGDRVTISCRASQSVNSWLAWYQQKPGKAPKLLIYKASNLEGGVPSSFSGSGSGTEFTLTISSLQPDDFATYYCQQYDTSWTFGQGTKVEIK

SEQ ID NO: 309 - protein, 107 aa, Synthetic construct
DIQMTQSPSTLSASVGDSVTITCRASQNIITWLAWYQQKPGKAPNLLIYKASSLESGVPSRFSGSGSGTEFTLTISSLQPDDFATYYCQQYSSYSYTFGQGTKLEIK

SEQ ID NO: 310 - protein, 107 aa, Synthetic construct
DIQMTQSPSSVSASVGDRVTITCRTSQGIRNWLAWYQQKPGKAPKLLIYAASSLQTGGPSRFSGSGSGTDFTLTISSLQPEDFATYYCQQANSFPYTFGQGTKLEIK

SEQ ID NO: 311 - protein, 106 aa, Synthetic construct
EIVLTQSPATLSVSPGERATLSCRASQSVSSNLAWYQQKPGQAPRLLIYGASSRATGIPDRFSGSGSGTDFTLTISRLEPEDFAVYYCQQYGSSFTFGPGTKVDIK

SEQ ID NO: 312 - protein, 114 aa, Synthetic construct
DIVMTQSPDSLAVSLGERATINCKSSQSVLYSSNNKNYLAWYQQKPGQPPKLLIYWASTRESGVPDRFSGSGSGTDFTLTISSLQAEDVAVYYCQQYGSSPMYTFGQGTKLEIK

SEQ ID NO: 313 - protein, 107 aa, Synthetic construct
EIVLTQSPGTLSLSPGERATLSCRASQNVRGSYLAWYQQKPGQAPRLLIYGASNRATDIPDRFSGSGSGTDFTLTISGLEPEDFVVYYCQQYGSSYTFGQGTKVEIK

SEQ ID NO: 314 - DNA, 336 bp, Synthetic construct
  source 1..336: mol_type = other DNA
gatattgtgatgactcagtctccactctccctgcccgtcacccctggagagccggcctccatctcctgcaggtctagtcagagcctcctgcatagtactggatacaactttttggattggtacctgcagaagccagggctgtctccacagctcctgatctatttggcttctaatcgggcctccggggtccctgacaggttcagtggcagtggatcaggcacagattttacactgaaaatcagcagagtggaggctgaggatgttggggtttattactgcatgcaagctctacaaactccgtacacttttggccaggggaccaagctggagatcaaa

SEQ ID NO: 315 - DNA, 321 bp, Synthetic construct
  source 1..321: mol_type = other DNA
gacatccagatgacccagtctccttccaccctgtctgcctctgtaggagacagagtcaccatcacttgccgggccagccagagtattagtacctggttggcctggtatcagcagaaaccagggaaagcccctaagctcctgatccataaggcgtctggtttagaaagtggggtcccatcaagattcagcggcagtggatctgggacagaattcactctcaccatcagcagcctgcagcctgatgattttgcaacttattactgccaacagtataatagtttttctctcattttcggcggagggaccagggtggagatcaaa

SEQ ID NO: 316 - DNA, 321 bp, Synthetic construct
  source 1..321: mol_type = other DNA
gacatccagatgacccagtctccatcttccgtgtctgcatctgtaggagacagagtcaccatcacttgtcgggcgagtcagggtattaccacctggttagcctggtatcagcagaaaccagggaaagcccctaagctcctgatctttggtgcatctagtttggaaagtggggtcccatcaaggttcagcggcagtggatctgggacagatttcactctcaccatcagcagcctgcagcctgaagattttgcaacttactattgtcaacaggctaacagtttcccgtggacgttcggccaagggaccaaggtggaaatcaaa

SEQ ID NO: 317 - DNA, 336 bp, Synthetic construct
  source 1..336: mol_type = other DNA
gatattgtgatgactcagtctccactctccctgcccgtcacccctggagagccggcctccatctcctgcaggtctagtcagcgcctcctgcatagtagtggatacaattatttggattggtatctgcagaagccaggacagtctccacagctcctgatctatttgggttctagtcgggcctccggggtccctgacaggttcagtggcagtggatcaggcacagattttacactgaaaatcagcagggtggaggctgaggatgttggggtttattactgcatgcaaggtctacaaactcctccgacgttcggccaagggaccaaggtggaaatcaaa

SEQ ID NO: 318 - DNA, 318 bp, Synthetic construct
  source 1..318: mol_type = other DNA
gacatccagatgacccagtctccttccaccctgtctgcatctgtaggagacagagtcaccatcagttgccgggccagtcagagtgttaatagctggttggcctggtatcagcagaaaccagggaaagcccctaaactcctgatctataaggcgtctaatttagaaggtggggtcccatcaagtttcagcggcagtggatctgggacagaattcactctcaccatcagcagcctgcagcctgatgattttgcaacttattactgccaacaatatgatacttcttggacgttcggccaagggaccaaggtggagatcaaa

SEQ ID NO: 319 - DNA, 321 bp, Synthetic construct
  source 1..321: mol_type = other DNA
gacatccagatgacccagtctccttccaccctgtctgcatctgtaggagacagcgtcaccatcacttgccgggccagtcagaatattattacctggttggcttggtatcagcagaaaccagggaaagcccctaacctcctgatctataaggcgtctagtttagaaagtggggtcccatcaaggttcagcggcagtggatctgggacagaattcactctcaccatcagcagcctgcagcctgatgattttgcaacttattactgccaacagtatagtagttattcgtacacttttggccaggggaccaagctggagatcaaa

SEQ ID NO: 320 - DNA, 321 bp, Synthetic construct
  source 1..321: mol_type = other DNA
gacatccagatgacccagtctccatcttccgtgtctgcatctgtaggagacagagtcaccatcacttgtcggacgagtcagggtattagaaactggttagcctggtatcagcagaaaccagggaaagcccctaaactcctgatctatgctgcatccagtttgcaaactgggggcccatcaaggttcagcggcagtggatctgggacagatttcactctcaccatcagcagcctgcagcctgaagattttgcaacttactattgtcaacaggctaacagtttcccgtacacttttggccaggggaccaagctggagatcaaa

SEQ ID NO: 321 - DNA, 318 bp, Synthetic construct
  source 1..318: mol_type = other DNA
gaaattgtgttgacgcagtctccagccaccctgtctgtgtctccaggggaaagagccaccctctcctgcagggccagtcagagtgttagcagcaacttagcctggtaccagcagaaacctggccaggctcccaggctcctcatctatggtgcatccagcagggccactggcatcccagacaggttcagtggcagtgggtctgggacagacttcactctcaccatcagcagactggagcctgaagattttgcagtgtattactgtcagcagtatggtagctcattcactttcggccctgggaccaaagtggatatcaaa

SEQ ID NO: 322 - DNA, 342 bp, Synthetic construct
  source 1..342: mol_type = other DNA
gacatcgtgatgactcagtctccagactccctggctgtgtctctgggcgagagggccaccatcaactgcaagtccagccagagtgttttatacagctccaacaataagaactacttagcttggtaccagcagaaaccaggacagcctcctaagctgctcatttactgggcatctacccgggaatccggggtccctgaccgattcagtggcagcgggtctgggacagatttcactctcaccatcagcagcctgcaggctgaagatgtggcagtttattactgtcagcagtatggtagctcacccatgtacacttttggccaggggaccaagctggagatcaaa

SEQ ID NO: 323 - DNA, 321 bp, Synthetic construct
  source 1..321: mol_type = other DNA
gaaattgtgttgacgcagtctccaggcaccctgtctttgtctccaggggaaagagccaccctctcctgcagggccagtcagaatgttaggggcagctacttagcctggtaccagcagaaacctggccaggctcccaggctcctcatatatggtgcatccaacagggccactgacatcccagacaggttcagtggcagtgggtctgggacagacttcactctcaccatcagcggcctggagcctgaagattttgtagtgtattactgtcagcagtatggtagttcgtacacttttggccaggggaccaaggtggagatcaaa

SEQ ID NO: 324 - protein, 124 aa, Synthetic construct
QVQLQESGPGLVKPSGTLSLTCAVSGGSISSRNWWSWVRQPPGKGLEWIGEIYHGGTTNYNPSLKSRVTISVDKSKNQFSLKLSSVTAADTAVYYCARGGLRLGELSPNAFDIWGQGTMVTVSS

SEQ ID NO: 325 - protein, 114 aa, Synthetic construct
QVQLQESGPGLVKPSGTLSLTCAVSGGSISSSNWWTWVRQPPGKGLEWIGETYHDGSTNYNPSLKSRVTISVDKSKNQFSLKLSSVTAADTAVYYCLEFYFDYWGQGTLVTVSS

SEQ ID NO: 326 - protein, 114 aa, Synthetic construct
QVQLQESGPGLVKPSGTLSLTCAVSGASISTSNWWTWVRQPPGKGLEWIGEIYHDGSTNYSPSLQSRVTISVDKSKNQFSLTLTSVTAADTAIYYCGDFYIDVWGNGTTVTVSS

SEQ ID NO: 327 - protein, 114 aa, Synthetic construct
QVQLQESGPGLVKPSGTLSLTCAVSGGSISTSDWWTWVRQPPGKGLEWIGEIYHSGSTNYNPSLKSRVTISVDKSKNQFSLKLSSVTAADTAVYYCADWYFDLWGRGTLVTVSS

SEQ ID NO: 328 - protein, 123 aa, Synthetic construct
QVQLQESGPGLVKPSGTLSLTCAVSGGSISISKWWSWVRQPPGKGLEWIGEIYHTGSTNYHPSLKSRVTISVDKSKNQFYLKLNSVTAADTAVYYCARDELRLGELSPSLDIWGQGTMVTVSS

SEQ ID NO: 329 - protein, 124 aa, Synthetic construct
QVQLQESGPGLVKPSGTLSLTCAVSGGSISSSNWWSWVRQSPGKGLEWIGEIYHSGTTNYNPSLKSRVTISVDKSKNQFSLKLSSATAADTAVYYCARDRLRLGESSSDVFDIWGQGTMVTVSS

SEQ ID NO: 330 - protein, 122 aa, Synthetic construct
QVQLQESGPGLVKPSGTLSLTCAVSGGSISGSHWWSWFRQPPGKGLEWIGEIYHTGSTNKNPSLKSRVTISLDKSKNQFSLRLRSVTDADTAVYYCARDQYTGSPRDAFDIWGQGTMVTVSS

SEQ ID NO: 331 - protein, 121 aa, Synthetic construct
QVQLQESGPGLVKPSGTLSLTCAVSGGSISSSNWWSWVRQSPGKGLEWIGEIYHTGSTNKKPSLKSRVIISVDKSKNQFSLKLISVNAADTAIYYCARDREGGTTEAFDIWGQGTMVTVSS

SEQ ID NO: 332 - protein, 122 aa, Synthetic construct
QVQLQESGPGLVKPSGTLSLTCAVSGGSISSSNWWSWVRQPPGKGLEWIGEIYHSGSTNYNPSLKSRVTISVDKSKNQFSLKLRSVTAADTAVYYCARDQLSSGPTDAFDIWGQGTMVTVSS

SEQ ID NO: 333 - protein, 120 aa, Synthetic construct
QVQLQESGPGLMKPSETLSLTCTVSGGSISSHYWSWIRQPPGKGLEWIGYIFYSGNINYNPSLKSRVTISVDTSKNQFSLKLRSVTTADTAVYYCARDRGGSYSYHFDCWGQGTLVTVSS

SEQ ID NO: 334 - protein, 119 aa, Synthetic construct
QVQLQESGPGLVKPSETMSLTCTVSGGSFTGYYWSWIRQPPGKGLEWIGYVHYSGGTKSNPSLKSRVTISVDTSKNQFSLKLSSVTAADTAVYYCARERYEWNSYFDYWGQGTLVTVSS

SEQ ID NO: 335 - DNA, 372 bp, Synthetic construct
  source 1..372: mol_type = other DNA
caggtgcagctgcaggagtcgggcccaggactggtgaagccttcggggaccctgtccctcacctgtgctgtctcgggtggctccatcagtagtcgtaactggtggagttgggtccgccagcccccagggaaggggctggagtggattggggaaatctatcatggtgggaccaccaactacaacccgtcccttaagagtcgagtcaccatatcagtagacaagtccaagaaccaattctccctgaagctgagttctgtgaccgccgcggacacggccgtgtattactgtgcgagagggggattacgtttgggggagttatcgcctaatgcttttgatatctggggacaagggacaatggtcaccgtctcttca

SEQ ID NO: 336 - DNA, 342 bp, Synthetic construct
  source 1..342: mol_type = other DNA
caggtgcagctgcaggagtcgggcccaggactggtgaagccttcggggaccctgtccctcacctgcgctgtctctggtggctccatcagcagtagtaactggtggacttgggtccgccagcccccagggaaggggctggagtggattggggaaacctatcatgatgggagcaccaactacaacccgtccctcaagagtcgagtcaccatttcagtagacaagtccaagaaccaattctccctgaaactgagttctgtgaccgccgcggacacggccgtgtattactgtttggaattctactttgactactggggccagggaaccctggtcaccgtctcctca

SEQ ID NO: 337 - DNA, 342 bp, Synthetic construct
  source 1..342: mol_type = other DNA
caggtgcagctgcaggagtcgggcccaggactggtgaagccttcggggaccctgtccctcacctgcgctgtgtctggtgcctccatcagcacaagtaattggtggacttgggtccgccagcccccagggaaggggctggagtggattggtgaaatctatcatgatgggagcaccaactacagcccgtccctccagagtcgagtcaccatatcagtagacaagtccaagaaccagttctccctgacgctgacctctgtgaccgccgcggacacggccatttattattgtggtgacttctacatagacgtctggggcaacgggaccacggtcaccgtctcctca

SEQ ID NO: 338 - DNA, 342 bp, Synthetic construct
  source 1..342: mol_type = other DNA
caggtgcagctgcaggagtcgggcccaggactggtgaagccttcggggaccctgtccctcacctgcgctgtctctggtggctccatcagcactagtgactggtggacttgggtccgccagcccccagggaaggggctggagtggattggggaaatctatcatagtgggagcaccaactacaacccgtccctcaagagtcgagtcaccatatcagtagacaaatccaagaaccagttctccctgaagctgagctctgtgaccgccgcggacacggccgtgtattactgtgcggactggtacttcgatctctggggccgtggcaccctggtcactgtctcctca

SEQ ID NO: 339 - DNA, 369 bp, Synthetic construct
  source 1..369: mol_type = other DNA
caggtgcagctgcaggagtcgggcccaggactggtgaagccttcggggaccctgtccctcacctgcgctgtgtctggtggctccatcagcattagtaaatggtggagttgggtccgccagcccccagggaagggactggagtggattggggaaatctatcatactgggagcaccaactaccacccgtccctcaagagccgagtcaccatatcagtagacaagtccaagaaccaattctacctgaagctgaactctgtgaccgccgcggacacggccgtatattactgtgcgagagatgaattacggttgggggagttatcgccctctcttgatatctggggacaagggacaatggtcaccgtctcttca

SEQ ID NO: 340 - DNA, 372 bp, Synthetic construct
  source 1..372: mol_type = other DNA
caggtgcagctgcaggagtcgggcccaggactggtgaagccttcggggaccctgtccctcacctgcgctgtctctggtggctccatcagcagtagtaactggtggagttgggtccgccagtccccagggaaggggctggaatggattggggaaatctatcatagtgggaccaccaactacaacccgtccctcaagagtcgagtcaccatatcagtagacaagtccaagaaccagttctccctgaagctgagctctgcgaccgccgcggacacggccgtgtattattgtgcgagagatagattacgtttgggggagtcatcgtccgatgtttttgatatctggggacaagggacaatggtcaccgtctcttca

SEQ ID NO: 341 - DNA, 366 bp, Synthetic construct
  source 1..366: mol_type = other DNA
caggtgcagctgcaggagtcgggcccaggactggtgaagccttcggggaccctgtccctcacctgcgctgtctctggtggctccatcagcggtagtcactggtggagttggttccgccagcccccaggaaaggggctggagtggattggggaaatctatcatactgggagcaccaacaaaaacccgtccctcaagagtcgagtcactatctcattagacaagtccaagaatcagttctccctgaggctgaggtctgtgaccgacgcggacacggccgtgtattactgtgcgagagatcagtatactgggagcccaagggatgcttttgatatctggggacaagggacaatggtcaccgtctcctca

SEQ ID NO: 342 - DNA, 363 bp, Synthetic construct
  source 1..363: mol_type = other DNA
caggtgcagctgcaggagtcgggcccaggactggtgaagccttcggggaccctgtccctcacctgcgctgtctctggtggctccatcagcagtagtaactggtggagttgggtccgccagtccccagggaaggggctggagtggattggggaaatctatcatactgggagcaccaacaaaaaaccgtccctcaagagtcgagtcatcatatcagtagacaagtccaagaaccagttctccctgaaactgatctctgtgaacgccgcggacacggccatatattactgtgcgagagatcgggaagggggaactactgaagcttttgatatctggggacaagggacaatggtcaccgtctcttca

SEQ ID NO: 343 - DNA, 366 bp, Synthetic construct
  source 1..366: mol_type = other DNA
caggtgcagctgcaggagtcgggcccaggactggtgaagccttcggggaccctgtccctcacctgcgctgtctctggtggctccatcagcagtagtaactggtggagttgggtccgccagcccccagggaaggggctggagtggattggggaaatctatcatagtgggagcaccaactacaacccgtccctcaagagtcgagtcaccatatcagtagacaagtccaagaaccagttctccctgaagctgaggtctgtgaccgccgcggacacggccgtttattactgtgcgagagatcaactaagtagcggacctacggatgcttttgatatctggggacaagggacaatggtcaccgtctcttca

SEQ ID NO: 344 - DNA, 360 bp, Synthetic construct
  source 1..360: mol_type = other DNA
caggtgcagctgcaggagtcgggcccaggactgatgaagccttcggagaccctgtccctcacctgcactgtctctggtggctccatcagtagtcactactggagctggatccggcaacccccagggaagggactggagtggattggatatatcttttacagtgggaacataaattacaacccctccctcaagagtcgagtcaccatatcagtagacacgtccaagaaccagttctccctgaagctgaggtctgtgaccactgcggacacggccgtatattactgtgcgagagatcgaggtgggagctattcgtaccactttgactgctggggccagggaaccctggtcaccgtctcctca

SEQ ID NO: 345 - DNA, 357 bp, Synthetic construct
  source 1..357: mol_type = other DNA
caggtgcagctgcaggagtcgggcccaggactggtgaagccttcggagactatgtccctcacctgcactgtctctggtggctccttcactggatactactggagttggatccggcagcccccagggaagggactggagtggattggatatgtccattacagtgggggcaccaaaagcaacccctccctcaagagtcgagtcaccatatcagtagacacgtccaagaaccagttttccctgaagctgagctctgtgaccgctgcggacacggccgtgtattactgtgcgagagagaggtatgagtggaactcctactttgactactggggccagggaaccctggtcaccgtctcctca

SEQ ID NO: 346 - protein, 107 aa, Synthetic construct
DIQMTQSPSSLSASVGDRVTITCRASQSISSYLNWYQQKPGKAPKVLIYAASSLQSGIPSRFSGSGSGTDFTLTISSLQPEDFATYYCQETYSVPLTFGGGTKVEIK

SEQ ID NO: 347 - protein, 107 aa, Synthetic construct
DIQMTQSPSSLSASVGDRVTITCRASQDIRNDLGWYQQKPGKVPKRLIYAASSLQSGVPSRFSGSGSGTEFTLTISSLQPEDFASYYCLQYNNYPFTLGPGTKVDIK

SEQ ID NO: 348 - protein, 107 aa, Synthetic construct
DIQMTQSPSSLSASVGDRVTITCRASQGIRKDLGWYQQKPGKAPKRLIYTASTLQSGVPSRFSGSGSGTEFTLTISSLQPEDFATYYCLQYNNYPFTFGPGTKVDIK

SEQ ID NO: 349 - protein, 107 aa, Synthetic construct
DIQMTQSPSSLSASVGDRVTITCRASQGIRNDLGWYQQKPGKAPKRLIYAASSLQSGVPSRFSGSGSGTEFTLAISSLQPEDFATYYCLHFNSYPFTFGPGTKVDIK

SEQ ID NO: 350 - protein, 107 aa, Synthetic construct
DIQMTQSPSSLSASVGDRVTITCRASQNINNYLNWFRQKPGKAPKLLIFAASSLQSGVPSRFSGSESGTDFTLTISSLQPEDFATYYCQQSYSTPLTFGGGTKVEIK

SEQ ID NO: 351 - protein, 113 aa, Synthetic construct
DIVMTQSPDSLAVSLGERATINCKSSQSVLYSSNNKNYLAWYQQKPGQPPELLIYWASTRESGVPDRFSGSGSGTDFTLTISSLQAEDMAVYYCQQFYNTPYTFGQGTKVDIK

SEQ ID NO: 352 - protein, 108 aa, Synthetic construct
EIVLTQSPGTLSLSPGERATLSCRASQSVSSSYLAWYQQKPGQAPRLLIYGASSRATGIPDRFSGSGSGTDFTLTISRLEPEDFAVYYCQHYGNSPLTFGGGTKVEIK

SEQ ID NO: 353 - protein, 106 aa, Synthetic construct
EIVMTQSPATLSVSPGERATLSCRASQSVSSNLAWYQQKPGQAPRLLIYGASTRATGIPVRFSGSGSGTQFTLTISSLQSEDFAVYYCQQYDNWRTFGQGTRLEIK

SEQ ID NO: 354 - protein, 106 aa, Synthetic construct
EIVMTQSPATLSVSPGERATLSCRASQSVSSNLAWYQQKPGQAPRLLIYGASTRATGIPVRFSGSGSGTQFTLTISSLQSEDFAVYYCQQYDNWRTFGQGTKLEIK

SEQ ID NO: 355 - protein, 107 aa, Synthetic construct
DIQMTQSPSSVSASVGDRVTITCRASQSFAGWLAWYQQKPGKAPKLLIYAASTLQSGVPSRFSGSGSGTDFTLTISSLQPEDFATYYCQQANSFPLTFGGGTKVEIK

SEQ ID NO: 356 - protein, 113 aa, Synthetic construct
DIVMTQSPDSLAVSLGERATINCKSSQSVLYSSNNKNYLAWYHQKPGQPPKLLIYWASTRESGVPDRFSGSGSGTDFTLTISSLQAEDVAVYYCQQYYSSPRTFGQGTKVEIK

SEQ ID NO: 357 - DNA, 321 bp, Synthetic construct
  source 1..321: mol_type = other DNA
gacatccagatgacccagtctccatcctccctgtctgcatctgtgggagacagagtcaccatcacttgccgggcaagtcagagcattagcagctatttaaattggtatcagcagaaaccagggaaagcccctaaggtcctgatctatgctgcatccagtttgcagagtgggatcccatcacggttcagtggcagtggatctgggacagatttcactctcaccatcagcagtctgcaacctgaagattttgcaacttactactgtcaagagacttacagtgttccgctcactttcggcggagggaccaaggtggagatcaaa

SEQ ID NO: 358 - DNA, 321 bp, Synthetic construct
  source 1..321: mol_type = other DNA
gacatccagatgacccagtctccatcctccctgtctgcatctgtaggagacagagtcaccatcacttgccgggcaagtcaggacattagaaatgatttaggctggtatcagcagaaaccagggaaagtccctaagcgcctgatctatgctgcatctagtttgcaaagtggggtcccatcaaggttcagcggcagtggatctgggacagaattcactctcacaatcagcagcctgcagcctgaagatttcgcaagttattactgtctacagtataataattatccattcactctcggccctgggaccaaagtggatatcaaa

SEQ ID NO: 359 - DNA, 321 bp, Synthetic construct
  source 1..321: mol_type = other DNA
gacatccagatgacccagtctccatcctccctgtctgcatctgtaggagacagagtcaccatcacttgccgggcaagtcagggcattagaaaagatttaggctggtatcagcagaaaccagggaaagcccctaagcgcctgatctatactgcatccactttacaaagtggggtcccatcaaggttcagcggcagtggatctgggacagaattcactctcacaatcagcagcctgcagcctgaagattttgcaacttattactgtctacagtataataattacccattcactttcggccctgggaccaaagtggatatcaaa

SEQ ID NO: 360 - DNA, 321 bp, Synthetic construct
  source 1..321: mol_type = other DNA
gacatccagatgacccagtctccatcctccctgtctgcttctgtcggagacagagtcaccatcacttgccgggcaagtcagggcattagaaatgatttaggctggtatcagcagaaaccagggaaagcccctaagcgcctgatctatgctgcatccagtttgcaaagtggggtcccatcaaggttcagcggcagtggatctgggacagaattcactctcgcaatcagcagcctgcagcctgaagattttgcaacttattactgtctacactttaatagttacccattcactttcggccctgggaccaaagtggatatcaaa

SEQ ID NO: 361 - DNA, 321 bp, Synthetic construct
  source 1..321: mol_type = other DNA
gacatccagatgacccagtctccatcctccctgtctgcatctgtaggagacagagtcaccatcacttgccgggcaagtcagaacattaacaactatttaaattggttccggcagaaaccagggaaagcccctaagctcctgatctttgctgcatccagtttacaaagtggggtcccatcaagattcagtggcagtgaatctgggacagatttcactctcaccatcagcagtctgcaacctgaggattttgcgacttactactgtcaacagagttacagtacccctctcactttcggcggagggaccaaggtggagatcaaa

SEQ ID NO: 362 - DNA, 339 bp, Synthetic construct
  source 1..339: mol_type = other DNA
gacatcgtgatgactcagtctccagactccctggctgtgtctctgggcgagagggccaccatcaactgcaagtccagccagagtgttttatacagctccaacaataagaactacttagcttggtaccagcagaaaccaggacagcctcctgagctgctcatttactgggcatctacccgggaatccggggtccctgaccgattcagtggcagcgggtctgggacagatttcactctcaccatcagcagcctgcaggctgaagatatggcagtttattactgtcaacaattttataatactccgtacacttttggccaggggaccaaagtggatatcaaa

SEQ ID NO: 363 - DNA, 324 bp, Synthetic construct
  source 1..324: mol_type = other DNA
gaaattgtgttgacgcagtctccaggcaccctgtctttgtctccaggggaaagagccaccctctcctgcagggccagtcagagtgttagcagcagctacttagcctggtaccagcagaaacctggccaggctcccaggctcctcatctatggtgcatccagcagggccactggcatcccagacaggttcagtggcagtgggtctgggacagacttcactctcaccatcagcagactggagcctgaagattttgcagtgtattactgtcagcattatggtaactcaccgctcactttcggcggagggaccaaggtggagatcaaa

SEQ ID NO: 364 - DNA, 318 bp, Synthetic construct
  source 1..318: mol_type = other DNA
gaaatagtgatgacgcagtctccagccaccctgtctgtgtctccaggggaaagagccaccctctcctgcagggccagtcagagtgttagcagcaacttagcctggtaccagcagaaacctggccaggctcccaggctcctcatctatggtgcatccaccagggccactggtatcccagtcaggttcagtggcagtgggtctgggacacagttcactctcaccatcagcagcctgcagtctgaagattttgcagtttattattgtcagcaatatgataactggcggacgttcggccaagggacacgactggagattaaa

SEQ ID NO: 365 - DNA, 318 bp, Synthetic construct
  source 1..318: mol_type = other DNA
gaaatagtgatgacgcagtctccagccaccctgtctgtgtctccaggggaaagagccaccctctcctgcagggccagtcagagtgttagcagcaacttagcctggtaccagcagaaacctggccaggctcccaggctcctcatctatggtgcatccaccagggccactggtatcccagtcaggttcagtggcagtgggtctgggacacagttcactctcaccatcagcagcctgcagtctgaagattttgcagtttattattgtcagcaatatgataactggcggacgttcggccaagggaccaagctggaaatcaaa

SEQ ID NO: 366 - DNA, 321 bp, Synthetic construct
  source 1..321: mol_type = other DNA
gacatccagatgacccagtctccatcttccgtgtctgcatctgtcggagacagagtcaccatcacttgtcgggcgagtcagagttttgccggctggttagcctggtatcagcagaaaccagggaaagcccctaagctcctgatatatgctgcatccactttgcaaagtggggtcccatcaaggttcagcggcagtggatctgggacagatttcactctcaccatcagcagcctgcagcctgaagattttgcaacttactattgtcaacaggctaacagtttccctctcactttcggcggagggaccaaggtggagatcaaa

SEQ ID NO: 367 - DNA, 339 bp, Synthetic construct
  source 1..339: mol_type = other DNA
gacatcgtgatgacccagtctccagactccctggctgtgtctctgggcgagagggccaccatcaactgcaagtccagtcagagtgttttatacagctccaacaataagaattacttagcttggtaccaccagaaaccaggacagcctcctaagctgctcatttactgggcatctacccgggaatccggggtccctgaccgattcagtggcagcgggtctgggacagatttcactctcaccatcagcagcctgcaggctgaagatgtggcagtttattactgtcagcaatactatagtagtcctcggacgttcggccaagggaccaaggtggaaatcaaa

SEQ ID NO: 368 - protein, 124 aa, Synthetic construct
QVQLQQSGPGLVKPSQTLSLTCAISGDSVSSNTAAWNWIRQSPSRGLEWLGRTYYRSKWYNDYAVSVKSRITINPDTSKNQFSLQLSSVTPQDTAIYYCASDNWNNGGPGFDPWGQGTLVTVSS

SEQ ID NO: 369 - protein, 123 aa, Synthetic construct
QVQLQQSGPGLVKPSQTLSLTCAISGDSVSSNSAAWNWIRQSPSRGLEWLGRTYYRSKWYNGYAVSMKSRITINPDTSKNQFSLQLNSVTPEDTAMYYCAREGVGATTGFDYWGQGTLVTVSS

SEQ ID NO: 370 - protein, 123 aa, Synthetic construct
QVQLQQSGPGLVKSSQTLSLTCAISGDTVSSNSAAWNWIRQSPSRGLEWLGRTFYRSRWSAAYAASVSSRITINPDTSKNQFSLQLTSVTPADTAVYYCAREGVGSSTGFDYWGQGTLVTVSS

SEQ ID NO: 371 - protein, 124 aa, Synthetic construct
QVQLQQSGPGLVKPSQTLSLTCAISGDSVSSNSAAWNWIRQSPSRGLEWLGRTYYRSKWFNNYSVSVKSRIAINPDTSKNQFSLQLNSVTPEDTAVYYCARDLGELLDWYFDLWGRGTLVTVSA

SEQ ID NO: 372 - protein, 124 aa, Synthetic construct
QVQLQQSGPGLVKPSQTLSLTCAISGDSVSSNSAAWNWIRQSPSRGLEWLGMTYYRSKWYSVFAVSVKSRITINTDTSKNQFSLQLNSVTPEDTAVYYCAREGGIVGATPFDYWGQGTLVTVSS

SEQ ID NO: 373 - protein, 122 aa, Synthetic construct
QVQLQQSGPGLVKPSQTLSLTCAISGDSVSSNSAAWNWIRQSPSRGLEWLGRTYYRSKLYSDYAVSVKSRITINPDTSRNQFSLQLNSVTPEDTAVYYCAREGGYTYGYDYWGQGTLVTVSS

SEQ ID NO: 374 - protein, 122 aa, Synthetic construct
QVQLQQSGPGLVKPSQTLSLTCAISGDSVSSNNAAWNWIRQSPSRGLEWLGRTYYRSKWYNAYAVSVKSRIIINPDTSRNQFSLQLNSVTPEDTAVYYCAREGGYIYGLDQWGQGTLVTVSS

SEQ ID NO: 375 - protein, 124 aa, Synthetic construct
QVQLQQSGPGLVKPSQTLSLTCAISGDSVSSNSAAWNWIRQSPSRGLEWLGKTYYRSKWYNYYALSVKSRITINPDTSKNQFSLHLNSVTPEDTAVYYCARDGDYYLPSPFDLWGHGTMVTVSS

SEQ ID NO: 376 - protein, 124 aa, Synthetic construct
QVQLQQSGPGLVKPSQTLSLTCAISGDSVSSNSAAWNWIRQSPSRGLEWLGRTYYRSKWYSDYPLSVKSRITINPDTSKNQFSLQLNSVTPEDTAVYYCARDSGIVETTPFDYWGQGTLVTVSS

SEQ ID NO: 377 - protein, 124 aa, Synthetic construct
QVQLQQSGPGLVKPSQTLSLTCAISGDSVSSNSASWNWIRQSPSRGLEWLGTTYYRSKWFNVYAVSVKSRITINPDTSKNQFSLHLNSVTPEDTAIYFCTRDRGDLLHWYFDLWGRGTLVTVSS

SEQ ID NO: 378 - protein, 124 aa, Synthetic construct
QVQLQQSGPGLVKPSQTLSLTCAISGDSVSSNSAAWNWIRQSPSRGLEWLGRTYYRSKWFNDYALSVKSRITINPDTSKNQFSLHLNSVTPEDTAVYYCAREPGIVAPGPFDYWGQGTLVTVSS

SEQ ID NO: 379 - protein, 124 aa, Synthetic construct
QVQLQQSGPGLVKPTQTLSLTCAISGDSVSSNSAAWNWIRQSPSRGLEWLGRTYYRSKWFNGYAVSVKSRITINPDASKNQFSLHLKSVTDEDTAVYYCATDRGELLHWYFDLWGRGTLVTVSS

SEQ ID NO: 380 - protein, 124 aa, Synthetic construct
QVQLQQSGPGLVKSSQTLSITCAISGDSVSSNSAAWNWIRQSPSRGLEWLGRTYYRSKWYNDYALSVKSRIIIKSDTSKNQFSLQLNSVTPEDTAVYYCAREPGIAAPGPFDYWGQGSLVTVSS

SEQ ID NO: 381 - DNA, 372 bp, Synthetic construct
  source 1..372: mol_type = other DNA
caggtacagctgcagcagtcaggtccaggactggtgaagccctcgcagaccctctcactcacctgtgccatttccggggacagtgtctctagcaacactgctgcttggaactggatcaggcagtccccatcgagaggccttgagtggctgggaaggacatactacaggtccaagtggtataatgattatgcagtatctgtgaaaagtcgaataaccatcaacccagacacatccaagaaccagttctccctgcagttgagctctgtgactccccaggacacggctatatattactgtgcgagcgataactggaacaacggaggccctgggttcgacccctggggccagggaaccctggtcaccgtctcctca

SEQ ID NO: 382 - DNA, 369 bp, Synthetic construct
  source 1..369: mol_type = other DNA
caggtacagctgcagcagtcaggtccaggactggtgaagccctcgcagaccctctcactcacctgtgccatctccggggacagtgtctctagcaacagtgctgcttggaactggatcaggcagtccccatcgagaggccttgagtggctgggaaggacatactacaggtccaagtggtataatggttatgcagtctctatgaaaagtcgaataaccatcaacccagacacatccaagaaccagttctccctgcagctgaactctgtgactcccgaggacacggctatgtattattgtgcaagagagggagtgggagctactacaggctttgactactggggccagggaaccctggtcaccgtctcctca

SEQ ID NO: 383 - DNA, 369 bp, Synthetic construct
  source 1..369: mol_type = other DNA
caggtacagctgcagcagtcaggtccaggactggtgaagtcctcgcagaccctctcactcacctgtgccatctccggggacactgtctctagtaatagtgctgcttggaactggatcaggcagtccccatcgagaggccttgagtggctgggaaggacattctataggtccaggtggtctgctgcttatgcagcgtctgtgagtagtcgaataaccatcaacccagacacatccaagaaccagttctccctgcagctgacctctgtgactcccgcggacacggctgtgtattactgtgcaagagagggagtaggatcttctacaggctttgactactggggccagggaaccctggtcaccgtctcctca

SEQ ID NO: 384 - DNA, 372 bp, Synthetic construct
  source 1..372: mol_type = other DNA
caggtacagctgcagcagtcaggtccaggactggtgaagccctcgcagaccctctcactcacctgtgccatctccggggacagtgtctctagcaacagtgctgcttggaactggatcaggcagtccccatcgagaggccttgagtggctgggaaggacatactacaggtccaagtggtttaataattattcagtttctgtgaaaagtcgaatagccattaacccagacacatccaagaaccagttctcccttcaactgaactctgtgactcccgaggacacggctgtgtattactgtgcaagagatctgggggagttacttgactggtacttcgatctctggggccgtggcaccctggtcactgtctccgca

SEQ ID NO: 385 - DNA, 372 bp, Synthetic construct
  source 1..372: mol_type = other DNA
caggtacagctgcagcagtcaggtccaggactggtgaagccctcgcagaccctctcactcacctgtgccatctccggggacagtgtctctagcaacagtgctgcttggaactggatcaggcagtccccatcgagaggccttgagtggctgggaatgacatactacaggtccaagtggtatagtgtttttgcagtatctgtgaaaagtcgaataaccatcaatacagacacatccaagaaccagttctccctgcagctgaactctgtgactcccgaggacacggctgtgtattactgtgcaagagaggggggtatagtgggagccaccccctttgactactggggccagggaaccctggtcaccgtctcttca

SEQ ID NO: 386 - DNA, 366 bp, Synthetic construct
  source 1..366: mol_type = other DNA
caggtacagctgcagcagtcaggtccaggactggtgaagccctcgcagaccctctcactcacctgtgccatctccggggacagtgtctctagcaacagtgctgcttggaactggatcaggcagtccccatcgagaggccttgagtggctgggcaggacatactacaggtccaagttgtatagtgattatgcagtatctgtgaaaagtcgaataaccatcaacccagacacatccaggaaccagttctccctgcagctgaactctgtgactcccgaggacacggctgtgtattactgtgcaagagaggggggatacacctatggttatgactactggggccagggaaccctggtcaccgtctcctca

SEQ ID NO: 387 - DNA, 366 bp, Synthetic construct
  source 1..366: mol_type = other DNA
caggtacagctgcagcagtcaggtccaggactggtgaagccctcgcagaccctctcactcacctgtgccatctccggggacagtgtctctagcaacaatgctgcttggaactggatcaggcagtccccatcgagaggccttgagtggctgggaaggacgtactacaggtccaagtggtataatgcttatgcagtttctgtgaaaagtcgaattatcatcaatccagacacatccaggaaccagttctccctgcaactgaactctgtgactcccgaggacacggctgtgtattactgtgcaagagagggtggatacatctatggtcttgaccaatggggccagggaaccctggtcaccgtctcctca

SEQ ID NO: 388 - DNA, 372 bp, Synthetic construct
  source 1..372: mol_type = other DNA
caggtgcagctgcagcagtcgggtccaggactggtgaagccctcgcagaccctctcactcacctgtgccatctccggggacagtgtctctagcaacagtgctgcttggaactggatcaggcagtccccatcgagaggccttgagtggctgggaaagacatactacaggtccaagtggtataattattatgcactatctgtgaaaagtcgaataaccatcaacccagacacatccaagaaccagttctccctgcacctgaactctgtgactcccgaggacacggctgtgtattactgtgcaagagacggtgactactaccttccctctccttttgatctctggggccacgggacaatggtcaccgtctcctca

SEQ ID NO: 389 - DNA, 372 bp, Synthetic construct
  source 1..372: mol_type = other DNA
caggtacagctgcagcagtcaggtccaggactggtgaagccctcgcagaccctctcactcacctgtgccatctccggggacagtgtctctagcaacagtgctgcttggaactggatcaggcagtccccatcgagaggccttgagtggctgggaaggacatactacaggtccaagtggtatagtgattatccactatctgtgaaaagtcgaataaccatcaaccccgacacatccaagaaccagttctccctgcagctgaactctgtgactcccgaggacacggctgtgtattactgtgcaagagactccggtatagttgaaaccacgccctttgactattggggccagggaaccctggtcaccgtctcctca

SEQ ID NO: 390 - DNA, 372 bp, Synthetic construct
  source 1..372: mol_type = other DNA
caggtacagctgcagcagtcaggtccaggactggtgaagccctcgcagaccctctcactcacctgtgccatctccggggacagtgtctctagtaacagtgcttcttggaactggatcaggcagtccccttcgagaggccttgagtggctgggaacgacatactacaggtccaagtggtttaatgtttatgcagtctctgtgaaaagtcgaataaccatcaacccagacacatccaagaaccaattctccctgcacctgaactctgtgactcccgaggacacggctatatatttctgtacaagagatcggggggacctactccactggtacttcgatctctggggccgtggcaccctggtcactgtctcctca

SEQ ID NO: 391 - DNA, 372 bp, Synthetic construct
  source 1..372: mol_type = other DNA
caggtacagctgcagcagtcgggtccaggactggtgaagccctcgcagaccctctcactcacctgtgccatctccggggacagtgtctctagcaacagtgctgcttggaactggatcaggcagtccccatcgagaggccttgagtggctgggaaggacatactacaggtccaagtggtttaatgattatgcactatctgtgaaaagtcgaataaccatcaacccagacacatccaagaaccagttctccctgcacctgaactctgtgactcccgaggacacggctgtgtattactgtgcaagagaacctggtatagtagcacctggcccttttgactactggggccagggaaccctggtcaccgtctcctca

SEQ ID NO: 392 - DNA, 372 bp, Synthetic construct
  source 1..372: mol_type = other DNA
caggtacagctgcagcagtcaggtccaggactggtgaagcccacgcagaccctctcactcacctgtgccatctccggggacagtgtctctagcaacagtgctgcatggaactggatcaggcagtccccatcgagaggccttgagtggctggggaggacatactacaggtccaagtggtttaatggttatgcagtatctgtgaaaagtcgaataaccatcaaccccgacgcatccaagaaccagttctccctgcacttgaagtctgtgactgacgaggacacggctgtatattactgtgcaacagatcggggggaactcctccactggtacttcgatctctggggccgtggcaccctggtcaccgtctcttca

SEQ ID NO: 393 - DNA, 372 bp, Synthetic construct
  source 1..372: mol_type = other DNA
caggtacagctgcagcagtcaggtccaggactggtgaagtcctcgcagaccctctcaatcacctgtgccatctccggggacagtgtctctagcaacagtgctgcttggaactggatcaggcagtccccatcgagaggccttgagtggctgggaaggacatactacaggtccaagtggtataatgattatgcactatctgtgaaaagtcgaataatcatcaagtcagacacatccaagaaccagttctccctgcagttgaactctgtgactcccgaggacacggctgtgtactactgtgcaagagaaccgggtatagcagcacctggtccatttgactactggggccagggatccctggtcaccgtctcctca

SEQ ID NO: 394 - protein, 107 aa, Synthetic construct
DIQMTQSPSSVSTSVGDRVTITCRASQGISSWLAWYQQKPGKAPKLLISAASSLQSGVPSRFSGSGSGTDFTLTISTLQPEDFASYYCQQANSFPPTFGQGTRVEIK

SEQ ID NO: 395 - protein, 107 aa, Synthetic construct
DIQMTQSPSSLSASVGDRVTITCRASQGISSWLTWYQQKPGKAPKLLIYAASSLQGGVPSRFSGSGSGTDFTLTISSLQPEDFATYYCQQANSFPPTFGQGTKVEIK

SEQ ID NO: 396 - protein, 107 aa, Synthetic construct
DIQMTQSPSSVSASIGDRVTITCRASKGISIWLAWYQQKPGKAPKVLISAASSLQSGAPSRFSGSGSGTDFTLTISSLQPEDFATYYCQQANSFPPTFGQGTKVEIK

SEQ ID NO: 397 - protein, 108 aa, Synthetic construct
EIVLTQSPGTLSLSPGDRATLSCRASQSVRNSYVAWYQQKPGQAPRLLIYGASSRATGIPDRFSGSGSGTDFSLTIGRLEPEDFVVYYCQQYGNSPLTFGGGTKVEIK

SEQ ID NO: 398 - protein, 113 aa, Synthetic construct
DIVMTQSPDSLAVSLGERATINCKSSQSVLYSSNNKNYLAWYQQKPGQPPKLLIYWASPRESGVPDRFSGSGSGTDFTLTISSLQAEDVAVYYCQQYYSIPRTFGQGTKVEIK

SEQ ID NO: 399 - protein, 107 aa, Synthetic construct
DIQMTQSPSSVSASVGDRVTITCRASQGISSWLAWYQQKPGKAPKVLIYAASSLQSGVPSRFSGSGSGTDFTLTISSLQPEDFATYYCQQANSFPPTFGPGTKVDIK

SEQ ID NO: 400 - protein, 107 aa, Synthetic construct
DIQMTQSPSSVSASVGDRVTITCRASQGVNNWLAWYQQKPGKAPKLLIHAASSLLSGVPSRFSGSGSGTDFTLTITSLQPEDFATYYCQQANSFPITFGQGTRLEIK

SEQ ID NO: 401 - protein, 113 aa, Synthetic construct
DIVMTQSPDSLAVSLGERATINCKSSQSVLYSSNNKNYLAWYQQKPGQPPKLLIYWASTRESGVPDRFSGSGSGTDFTLTISSLQAEDVAVYYCQQYYSTPYTFGQGTKLEIK

SEQ ID NO: 402 - protein, 113 aa, Synthetic construct
DIVMTQSPDSLAVSLGERATINCKSSQSVLYSSNNKNYLAWYQQKPGQPPKLLIYWASNRESGVPDRFSGSGSGTDFTLTISSLQAEDVAVYYCQQYYSTPYTFGQGTKLEIK

SEQ ID NO: 403 - protein, 107 aa, Synthetic construct
EIVLTQSPGTLSLSPGERATLSCRASQSVSSSYLAWYQQKPGQSPRLLIYGASSRATGIPDRFSGSGSGTDFTLTISRLEPEDFAVYYCQQYGRSVTFGGGTKLEIK

SEQ ID NO: 404 - protein, 113 aa, Synthetic construct; identical to SEQ ID NO: 401

SEQ ID NO: 405 - protein, 107 aa, Synthetic construct
EIVLTQSPDTLSLSPGERATLSCRASQTIRSSYLAWYQLKPGQAPRLLIYGASSRATGIPDRFSGSGSGTDFTLSISRLEPEDFAVYYCQQYGRSIIFGGGTKVEIK

SEQ ID NO: 406 - protein, 107 aa, Synthetic construct
DIQMTQSPSSVSASVGDRVTITCRASQGISSWLAWYQQKPGKAPKLLIYAASSLQSGVPSRFSGSGSGTDFTLTISSLQPEDFATYYCQQNYRTPITFGQGTRLEIK

SEQ ID NO: 407 - DNA, 321 bp, Synthetic construct
  source 1..321: mol_type = other DNA
gacatccagatgacccagtctccatcttccgtgtctacatctgttggagacagagtcaccatcacttgtcgggcgagtcagggtattagcagctggttagcctggtatcagcagaaaccagggaaagcccctaagctcctgatctctgctgcatccagtttgcaaagtggggtcccatcaaggttcagcggcagtggatctgggacagatttcactctcaccatcagcaccctgcagcctgaagactttgcatcttactattgtcaacaggctaacagtttccctccgacgttcggccaagggaccagggtggaaatcaaa

SEQ ID NO: 408 - DNA, 321 bp, Synthetic construct
  source 1..321: mol_type = other DNA
gacatccagatgacccagtctccatcttccctgtctgcatctgtcggagacagagtcaccatcacttgtcgggcgagtcagggtattagcagctggttaacctggtatcagcagaaaccagggaaagcccctaagctcctgatctatgctgcatccagtttgcaaggtggggtcccatcaagattcagcggcagtggatctgggacagatttcactctcaccatcagcagcctgcagcctgaagattttgcaacttactattgtcaacaggctaacagtttccctccgacgttcggccaagggaccaaggtggaaatcaaa

SEQ ID NO: 409 - DNA, 321 bp, Synthetic construct
  source 1..321: mol_type = other DNA
gacatccagatgacccagtctccatcttccgtgtctgcatctataggagacagagtcaccatcacttgtcgggcgagtaagggaattagcatctggttagcctggtatcagcagaaaccagggaaagcccctaaggtcctgatctctgctgcatccagtttgcaaagtggggccccatcaaggttcagcggcagtggatctgggacagatttcactctcaccatcagcagcctgcagcctgaagattttgcaacttactattgtcaacaggctaacagtttccctccgacgttcggccaagggaccaaggtggagatcaaa

SEQ ID NO: 410 - DNA, 324 bp, Synthetic construct
  source 1..324: mol_type = other DNA
gaaattgtgttgacgcagtctccaggcaccctgtctttgtctccaggggacagagccaccctctcatgcagggccagtcagagtgttaggaacagttacgtagcctggtaccagcagaaacctggccaggctcccaggctcctcatctatggtgcatccagcagggccactggcatcccagacaggttcagtggcagtgggtctgggacagacttcagtctcaccatcggcagactggagcctgaggattttgtagtgtattattgtcagcaatacggtaactcacctctcactttcggcggagggaccaaggtggagatcaaa

SEQ ID NO: 411 - DNA, 339 bp, Synthetic construct
  source 1..339: mol_type = other DNA
gacatcgtgatgacccagtctccagactccctggctgtgtctctgggcgagagggccaccatcaactgcaagtccagccagagtgttttatacagctccaacaataagaactacttagcttggtaccagcagaaacctggacagcctcctaagctgctcatttactgggcatctccccgggaatccggggtccctgaccggttcagtggcagcgggtctgggacagatttcactctcaccatcagcagcctgcaggctgaagatgtggcagtttattattgtcagcaatattatagtattcctcggacgttcggccaagggaccaaggtggaaatcaaa

SEQ ID NO: 412 - DNA, 321 bp, Synthetic construct
  source 1..321: mol_type = other DNA
gacatccagatgacccagtctccatcttccgtgtctgcatctgtaggagacagagtcaccatcacttgtcgggcgagtcagggtattagcagctggttagcctggtatcagcagaaaccagggaaagcccctaaggtcctgatctatgctgcatccagtttgcaaagtggggtcccatcaaggttcagcggcagtggatctgggacagatttcactctcaccatcagcagcctgcagcctgaagattttgcaacttactattgtcaacaggctaacagtttccctcccactttcggccctgggaccaaagtggatatcaaa

SEQ ID NO: 413 - DNA, 321 bp, Synthetic construct
  source 1..321: mol_type = other DNA
gacatccagatgactcagtctccatcttccgtgtctgcatctgtaggagacagagtcaccatcacttgtcgggcgagtcagggtgttaacaactggttagcctggtatcagcagaaaccagggaaagcccctaagctcctgatccatgctgcatccagtttgctaagtggggtcccatcaaggttcagcggcagtggatctgggacagatttcacgctcaccatcaccagcctgcagcctgaagattttgcaacttactattgtcaacaggctaacagtttccccatcaccttcggccaagggacacgactggaaattaaa

SEQ ID NO: 414 - DNA, 339 bp, Synthetic construct
  source 1..339: mol_type = other DNA
gacatcgtgatgacccagtctccagactccctggctgtgtctctgggcgagagggccaccatcaactgcaagtccagccagagtgttttatacagctccaacaataagaactacttagcttggtaccagcagaaaccaggacagcctcctaagctgctcatttactgggcatctacccgggaatccggggtccctgaccgattcagtggcagcgggtctgggacagatttcactctcaccatcagcagcctgcaggctgaagatgtggcagtttattactgtcagcaatattatagtactccgtacacttttggccaggggaccaagctggagatcaaa

SEQ ID NO: 415 - DNA, 339 bp, Synthetic construct
  source 1..339: mol_type = other DNA
gacatcgtgatgacccagtctccagactccctggctgtgtctctgggcgagagggccaccatcaactgcaagtccagccagagtgttttatacagctccaacaataagaactacttagcttggtaccagcagaaaccaggacagcctcctaagctgctcatttactgggcatctaaccgggaatccggggtccctgaccgattcagtggctccgggtctgggacagatttcactctcaccatcagcagcctgcaggctgaagatgtggcagtttattactgtcagcaatattatagtactccgtacacttttggccaggggaccaagctggagatcaaa

SEQ ID NO: 416 - DNA, 321 bp, Synthetic construct
  source 1..321: mol_type = other DNA
gaaattgtgttgacgcagtctccaggcaccctgtctttgtctccaggggagagagccaccctctcctgcagggccagtcagagtgttagcagcagctacttagcctggtaccagcagaaacctggccagtctcccaggctcctcatctatggtgcatccagcagggccactggcatcccagacaggttcagtggcagtgggtctgggacagacttcactctcaccatcagcagactggagcctgaggattttgcagtatattactgtcagcagtatggtaggtcagtcactttcggcggagggaccaagctggaaatcaaa

SEQ ID NO: 417 - DNA, 339 bp, Synthetic construct
  source 1..339: mol_type = other DNA
gacatcgtgatgacccagtctccagactccctggctgtgtctctgggcgagagggccaccatcaactgcaagtccagccagagtgttttatacagctccaacaataagaactacttagcttggtaccagcagaaaccaggacagcctcctaagctgctcatttactgggcatctacccgggaatccggggtccctgaccgattcagtggcagcgggtctgggacagatttcactctcaccatcagcagcctgcaggctgaagatgtggcagtttattactgtcagcaatattatagtactccgtacacttttggccaggggaccaagctggaaatcaaa

SEQ ID NO: 418 - DNA, 321 bp, Synthetic construct
  source 1..321: mol_type = other DNA
gaaatagtgctgactcagtctccagacaccctatctttgtctccaggggaaagagccaccctctcctgcagggccagtcagactattaggagcagctacttagcctggtaccagctgaaacctggccaggctcccaggctcctcatctatggtgcatccagcagggccactggcatcccagacaggttcagtggcagtgggtctgggacagacttcactctctccatcagcagactggagcctgaagattttgcagtgtattactgtcaacagtatggccgctcaatcattttcggcggagggaccaaagtggaaatcaaa

SEQ ID NO: 419 - DNA, 321 bp, Synthetic construct
  source 1..321: mol_type = other DNA
gacatccagatgacccagtctccatcttccgtgtctgcatctgtaggagacagagtcaccatcacttgtcgggcgagtcagggtattagcagctggttagcctggtatcagcagaaaccagggaaagcccctaagctcctgatctatgctgcatccagtttgcaaagtggggtcccatcaaggttcagcggcagtggatctgggacagatttcactctcaccatcagcagcctgcagcctgaagattttgcaacttactactgtcaacagaattacagaaccccgatcaccttcggccaagggacacgactggagattaaa

SEQ ID NO: 420 - protein, 454 aa, Synthetic construct
QVQLVQSGAEVKKPGASVKVSCKASGYTFTTYGISWVRQAPGQGLEWMGWISAYSGNTHYAQSLQDRVTMTTDTSTSTAYMEVRSLRSDDTAVYYCAKDEGYCSSTGCLNLFDPWGQGTLVTVSSASTKGPSVFPLAPSSKSTSGGTAALGCLVKDYFPEPVTVSWNSGALTSGVHTFPAVLQSSGLYSLSSVVTVPSSSLGTQTYICNVNHKPSNTKVDKRVEPKSCDKTHTCPPCPAPELLGGPSVFLFPPKPKDTLMISRTPEVTCVVVDVSHEDPEVKFNWYVDGVEVHNAKTKPREEQYASTYRVVSVLTVLHQDWLNGKEYKCKVSNKALPAPIEKTISKAKGQPREPQVYTLPPSREEMTKNQVSLTCLVKGFYPSDIAVEWESNGQPENNYKTTPPVLDSDGSFFLYSKLTVDKSRWQQGNVFSCSVMHEALHNHYTQKSLSLSPG

SEQ ID NO: 421 - protein, 447 aa, Synthetic construct
QVQLVQSGAEVKKPGASVKVSCKASGYTFTSYGISWVRQAPGQGLEWMGWISAYNGNTNYAQKLQGRVTMTTDTSTSTAYMELRSLRSDDTAIYYCTRDLRGTAFDYWGQGTPVTVSSASTKGPSVFPLAPSSKSTSGGTAALGCLVKDYFPEPVTVSWNSGALTSGVHTFPAVLQSSGLYSLSSVVTVPSSSLGTQTYICNVNHKPSNTKVDKRVEPKSCDKTHTCPPCPAPELLGGPSVFLFPPKPKDTLMISRTPEVTCVVVDVSHEDPEVKFNWYVDGVEVHNAKTKPREEQYASTYRVVSVLTVLHQDWLNGKEYKCKVSNKALPAPIEKTISKAKGQPREPQVYTLPPSREEMTKNQVSLTCLVKGFYPSDIAVEWESNGQPENNYKTTPPVLDSDGSFFLYSKLTVDKSRWQQGNVFSCSVMHEALHNHYTQKSLSLSPG

SEQ ID NO: 422 - protein, 451 aa, Synthetic construct
QVQLVQSGAEVKKPGASVKVSCKASGYTFTGYYMHWVRQAPGQGLEWMGWINPNSGGTNYAKKFQGRVTMTRDTSISTAYMELSRLRSDDTAVYYCARGDTIFRLVTPLDYWGQGTLVTVSSASTKGPSVFPLAPSSKSTSGGTAALGCLVKDYFPEPVTVSWNSGALTSGVHTFPAVLQSSGLYSLSSVVTVPSSSLGTQTYICNVNHKPSNTKVDKRVEPKSCDKTHTCPPCPAPELLGGPSVFLFPPKPKDTLMISRTPEVTCVVVDVSHEDPEVKFNWYVDGVEVHNAKTKPREEQYASTYRVVSVLTVLHQDWLNGKEYKCKVSNKALPAPIEKTISKAKGQPREPQVYTLPPSREEMTKNQVSLTCLVKGFYPSDIAVEWESNGQPENNYKTTPPVLDSDGSFFLYSKLTVDKSRWQQGNVFSCSVMHEALHNHYTQKSLSLSPG

SEQ ID NO: 423 - protein, 449 aa, Synthetic construct
QVQLVQSGAEVKKPGASVKVSCKASGYTFTNYYMQWVRQAPGQGLEWLGIIDPSGGSTTYAQKFQGRVTMTRDTSTSTVHMELRSLRSEDTAVYYCARDEGTDRPGWGYWGQGTLVTVSSASTKGPSVFPLAPSSKSTSGGTAALGCLVKDYFPEPVTVSWNSGALTSGVHTFPAVLQSSGLYSLSSVVTVPSSSLGTQTYICNVNHKPSNTKVDKRVEPKSCDKTHTCPPCPAPELLGGPSVFLFPPKPKDTLMISRTPEVTCVVVDVSHEDPEVKFNWYVDGVEVHNAKTKPREEQYASTYRVVSVLTVLHQDWLNGKEYKCKVSNKALPAPIEKTISKAKGQPREPQVYTLPPSREEMTKNQVSLTCLVKGFYPSDIAVEWESNGQPENNYKTTPPVLDSDGSFFLYSKLTVDKSRWQQGNVFSCSVMHEALHNHYTQKSLSLSPG

SEQ ID NO: 424 - protein, 446 aa, Synthetic construct
QVQLVQSGAEVKKPGASVKVSCKASGYTFTSYYMHWVRQAPGQGLEWMGIINPSGGSTNYAQKFQGRLTMTRDTSTNTVYMELSSLRSEDTAVYYCATDQSGGMDVWGKGTTVTVSSASTKGPSVFPLAPSSKSTSGGTAALGCLVKDYFPEPVTVSWNSGALTSGVHTFPAVLQSSGLYSLSSVVTVPSSSLGTQTYICNVNHKPSNTKVDKRVEPKSCDKTHTCPPCPAPELLGGPSVFLFPPKPKDTLMISRTPEVTCVVVDVSHEDPEVKFNWYVDGVEVHNAKTKPREEQYASTYRVVSVLTVLHQDWLNGKEYKCKVSNKALPAPIEKTISKAKGQPREPQVYTLPPSREEMTKNQVSLTCLVKGFYPSDIAVEWESNGQPENNYKTTPPVLDSDGSFFLYSKLTVDKSRWQQGNVFSCSVMHEALHNHYTQKSLSLSPG

SEQ ID NO: 425 - protein, 448 aa, Synthetic construct
QVQLVQSGAEVKKPGASVKVSCKASGYTFTSYYMHWVRQAPGQGLEWMGIINPSGGSTSYAQKFQGRVTMTRDTSTNTVYMELSSLRSEDTAVYYCARDPEYSSAFDIWGQGTMVTVSSASTKGPSVFPLAPSSKSTSGGTAALGCLVKDYFPEPVTVSWNSGALTSGVHTFPAVLQSSGLYSLSSVVTVPSSSLGTQTYICNVNHKPSNTKVDKRVEPKSCDKTHTCPPCPAPELLGGPSVFLFPPKPKDTLMISRTPEVTCVVVDVSHEDPEVKFNWYVDGVEVHNAKTKPREEQYASTYRVVSVLTVLHQDWLNGKEYKCKVSNKALPAPIEKTISKAKGQPREPQVYTLPPSREEMTKNQVSLTCLVKGFYPSDIAVEWESNGQPENNYKTTPPVLDSDGSFFLYSKLTVDKSRWQQGNVFSCSVMHEALHNHYTQKSLSLSPG

SEQ ID NO: 426 - DNA, 1362 bp, Synthetic construct
  source 1..1362: mol_type = other DNA
caggttcagctggtgcagtctggagctgaggtgaagaagcctggggcctcagtgaaggtctcctgcaaggcttctggttacacctttaccacctatggtatcagctgggtgcgacaggcccctggacaagggcttgagtggatgggatggatcagcgcttacagtggtaacacacactatgcacagagcctccaggacagagtcaccatgaccacagacacatccacgagtacagcctacatggaggtgaggagcctgagatctgacgacacggccgtgtattactgtgcgaaagatgagggatattgtagtagtaccggctgcttaaacttgttcgacccctggggccagggaaccctggtcaccgtctcctcagctagcactaaagggccttctgtatttcccttggccccgtccagcaaatcgacctcgggagggacagccgccctgggttgccttgtgaaagattatttccctgagccagttaccgtaagttggaacagtggggcgctgacaagtggtgtgcacacgtttcctgccgtcctgcaatcatcgggcttgtatagcctcagctctgtggtcactgtcccaagttcatcgctgggcactcagacgtatatttgcaatgtgaaccacaaaccttcaaatacaaaagtggataaacgcgtagaaccgaaatcgtgtgataaaactcacacatgcccgccatgcccggcacctgaactgcttggtggtcccagcgtgttcctgttcccgccgaagcctaaagatactctaatgatcagccgtacgccagaggtgacatgtgtcgtggttgacgtgtcccacgaagatcccgaagttaagttcaattggtatgttgatggtgtagaggtacacaatgctaagactaaacctcgcgaggagcagtacgcctcgacctatcgtgtcgtgagcgttctgaccgtccttcaccaagattggcttaacggcaaagaatataagtgcaaggtaagcaataaagcacttccggccccaatcgagaaaaccatttccaaggccaaaggtcaaccaagagaaccccaggtgtatactcttccgccttctcgtgaggaaatgactaaaaatcaagtatcccttacgtgtctggttaaaggtttttatcctagcgatattgctgttgaatgggaatcgaacggtcagccggagaataattataaaacaacgccacccgtcctggatagcgacggctcattttttctgtatagcaaactgactgtagataaatcacggtggcagcagggcaatgtattcagttgctccgttatgcatgaagcgttacataatcactacacgcagaaatctcttagtctttcacccggt

SEQ ID NO: 427 - DNA, 1341 bp, Synthetic construct
  source 1..1341: mol_type = other DNA
caggttcagctggtgcagtctggagctgaggtgaagaagcctggggcctcagtgaaggtctcctgcaaggcttctggttacacctttaccagctatggtatcagctgggtgcgacaggcccctggacaagggcttgagtggatgggatggatcagcgcttacaatggtaacacaaactatgcacagaagctccagggcagagtcaccatgaccacagacacatccacgagcacagcctacatggagctgaggagcctgagatctgacgacactgccatttattactgtacgagagatctacgtggaactgcctttgactactggggccagggaaccccggtcactgtctcctcagctagcactaaagggccttctgtatttcccttggccccgtccagcaaatcgacctcgggagggacagccgccctgggttgccttgtgaaagattatttccctgagccagttaccgtaagttggaacagtggggcgctgacaagtggtgtgcacacgtttcctgccgtcctgcaatcatcgggcttgtatagcctcagctctgtggtcactgtcccaagttcatcgctgggcactcagacgtatatttgcaatgtgaaccacaaaccttcaaatacaaaagtggataaacgcgtagaaccgaaatcgtgtgataaaactcacacatgcccgccatgcccggcacctgaactgcttggtggtcccagcgtgttcctgttcccgccgaagcctaaagatactctaatgatcagccgtacgccagaggtgacatgtgtcgtggttgacgtgtcccacgaagatcccgaagttaagttcaattggtatgttgatggtgtagaggtacacaatgctaagactaaacctcgcgaggagcagtacgcctcgacctatcgtgtcgtgagcgttctgaccgtccttcaccaagattggcttaacggcaaagaatataagtgcaaggtaagcaataaagcacttccggccccaatcgagaaaaccatttccaaggccaaaggtcaaccaagagaaccccaggtgtatactcttccgccttctcgtgaggaaatgactaaaaatcaagtatcccttacgtgtctggttaaaggtttttatcctagcgatattgctgttgaatgggaatcgaacggtcagccggagaataattataaaacaacgccacccgtcctggatagcgacggctcattttttctgtatagcaaactgactgtagataaatcacggtggcagcagggcaatgtattcagttgctccgttatgcatgaagcgttacataatcactacacgcagaaatctcttagtctttcacccggt

SEQ ID NO: 428 - DNA, 1353 bp, Synthetic construct
  source 1..1353: mol_type = other DNA
caggtgcagctggtgcaatctggggctgaggtgaagaagcctggggcctcagtgaaggtctcctgcaaggcttctggatacaccttcaccggctactatatgcactgggtgcgacaggcccctggacaaggacttgagtggatgggatggatcaaccctaacagtggtggcacaaactatgcaaagaagtttcagggcagggtcaccatgaccagggacacgtccatcagcacagcctacatggagttgagcaggctgagatctgacgacacggccgtgtattactgtgcgagaggggatacgatttttcgactggttacccctcttgactactggggccagggaaccctggtcaccgtctcctcagctagcactaaagggccttctgtatttcccttggccccgtccagcaaatcgacctcgggagggacagccgccctgggttgccttgtgaaagattatttccctgagccagttaccgtaagttggaacagtggggcgctgacaagtggtgtgcacacgtttcctgccgtcctgcaatcatcgggcttgtatagcctcagctctgtggtcactgtcccaagttcatcgctgggcactcagacgtatatttgcaatgtgaaccacaaaccttcaaatacaaaagtggataaacgcgtagaaccgaaatcgtgtgataaaactcacacatgcccgccatgcccggcacctgaactgcttggtggtcccagcgtgttcctgttcccgccgaagcctaaagatactctaatgatcagccgtacgccagaggtgacatgtgtcgtggttgacgtgtcccacgaagatcccgaagttaagttcaattggtatgttgatggtgtagaggtacacaatgctaagactaaacctcgcgaggagcagtacgcctcgacctatcgtgtcgtgagcgttctgaccgtccttcaccaagattggcttaacggcaaagaatataagtgcaaggtaagcaataaagcacttccggccccaatcgagaaaaccatttccaaggccaaaggtcaaccaagagaaccccaggtgtatactcttccgccttctcgtgaggaaatgactaaaaatcaagtatcccttacgtgtctggttaaaggtttttatcctagcgatattgctgttgaatgggaatcgaacggtcagccggagaataattataaaacaacgccacccgtcctggatagcgacggctcattttttctgtatagcaaactgactgtagataaatcacggtggcagcagggcaatgtattcagttgctccgttatgcatgaagcgttacataatcactacacgcagaaatctcttagtctttcacccggt

SEQ ID NO: 429 - DNA, 1347 bp, Synthetic construct
  source 1..1347: mol_type = other DNA
caggtgcagctggtgcaatctggagctgaggtgaagaagcctggggcctcagtgaaggtttcctgcaaggcatctggatacaccttcaccaactactatatgcagtgggtgcgacaggcccctggacaagggcttgagtggctgggaataatcgaccctagtggtggtagcacaacctatgcacagaagttccagggcagagtcaccatgaccagggacacgtccacgagcacagtccacatggagctgagaagtctgagatctgaggacacggccgtctattattgcgcgagagatgagggaacagatcgtcccgggtggggctactggggccagggaaccctggtcactgtctcctcagctagcactaaagggccttctgtatttcccttggccccgtccagcaaatcgacctcgggagggacagccgccctgggttgccttgtgaaagattatttccctgagccagttaccgtaagttggaacagtggggcgctgacaagtggtgtgcacacgtttcctgccgtcctgcaatcatcgggcttgtatagcctcagctctgtggtcactgtcccaagttcatcgctgggcactcagacgtatatttgcaatgtgaaccacaaaccttcaaatacaaaagtggataaacgcgtagaaccgaaatcgtgtgataaaactcacacatgcccgccatgcccggcacctgaactgcttggtggtcccagcgtgttcctgttcccgccgaagcctaaagatactctaatgatcagccgtacgccagaggtgacatgtgtcgtggttgacgtgtcccacgaagatcccgaagttaagttcaattggtatgttgatggtgtagaggtacacaatgctaagactaaacctcgcgaggagcagtacgcctcgacctatcgtgtcgtgagcgttctgaccgtccttcaccaagattggcttaacggcaaagaatataagtgcaaggtaagcaataaagcacttccggccccaatcgagaaaaccatttccaaggccaaaggtcaaccaagagaaccccaggtgtatactcttccgccttctcgtgaggaaatgactaaaaatcaagtatcccttacgtgtctggttaaaggtttttatcctagcgatattgctgttgaatgggaatcgaacggtcagccggagaataattataaaacaacgccacccgtcctggatagcgacggctcattttttctgtatagcaaactgactgtagataaatcacggtggcagcagggcaatgtattcagttgctccgttatgcatgaagcgttacataatcactacacgcagaaatctcttagtctttcacccggt

SEQ ID NO: 430 - DNA, 1338 bp, Synthetic construct
  source 1..1338: mol_type = other DNA
caggtgcagctggtgcaatctggggctgaggtgaagaagcctggggcctcagtgaaggtttcctgcaaggcatctggatacaccttcaccagctactatatgcactgggtgcgacaggcccctggacaagggcttgagtggatgggaataatcaaccctagtggtggtagcacaaactacgcacagaagttccagggcagactcaccatgaccagggacacgtccacgaacacagtctacatggaactgagtagcctgagatctgaggacacggccgtgtattactgtgcgacagatcaaagtggggggatggacgtctggggcaaagggaccacggtcaccgtctcctcagctagcactaaagggccttctgtatttcccttggccccgtccagcaaatcgacctcgggagggacagccgccctgggttgccttgtgaaagattatttccctgagccagttaccgtaagttggaacagtggggcgctgacaagtggtgtgcacacgtttcctgccgtcctgcaatcatcgggcttgtatagcctcagctctgtggtcactgtcccaagttcatcgctgggcactcagacgtatatttgcaatgtgaaccacaaaccttcaaatacaaaagtggataaacgcgtagaaccgaaatcgtgtgataaaactcacacatgcccgccatgcccggcacctgaactgcttggtggtcccagcgtgttcctgttcccgccgaagcctaaagatactctaatgatcagccgtacgccagaggtgacatgtgtcgtggttgacgtgtcccacgaagatcccgaagttaagttcaattggtatgttgatggtgtagaggtacacaatgctaagactaaacctcgcgaggagcagtacgcctcgacctatcgtgtcgtgagcgttctgaccgtccttcaccaagattggcttaacggcaaagaatataagtgcaaggtaagcaataaagcacttccggccccaatcgagaaaaccatttccaaggccaaaggtcaaccaagagaaccccaggtgtatactcttccgccttctcgtgaggaaatgactaaaaatcaagtatcccttacgtgtctggttaaaggtttttatcctagcgatattgctgttgaatgggaatcgaacggtcagccggagaataattataaaacaacgccacccgtcctggatagcgacggctcattttttctgtatagcaaactgactgtagataaatcacggtggcagcagggcaatgtattcagttgctccgttatgcatgaagcgttacataatcactacacgcagaaatctcttagtctttcacccggt

SEQ ID NO: 431 - DNA, 1344 bp, Synthetic construct
  source 1..1344: mol_type = other DNA
caggtgcagctggtgcaatctggggctgaggtgaagaagcctggggcctcagtgaaggtttcctgcaaggcatctggatacaccttcaccagttactatatgcactgggtgcgacaggcccctggacaagggcttgagtggatgggaataatcaaccctagtggtggtagcacaagctacgcacagaagttccagggcagagtcaccatgaccagggacacgtcaacgaacacagtctacatggagctgagcagccttcgatctgaggacacggccgtgtattactgtgcgagagatcccgagtatagcagtgcttttgatatctggggacaagggacaatggtcaccgtctcctcagctagcactaaagggccttctgtatttcccttggccccgtccagcaaatcgacctcgggagggacagccgccctgggttgccttgtgaaagattatttccctgagccagttaccgtaagttggaacagtggggcgctgacaagtggtgtgcacacgtttcctgccgtcctgcaatcatcgggcttgtatagcctcagctctgtggtcactgtcccaagttcatcgctgggcactcagacgtatatttgcaatgtgaaccacaaaccttcaaatacaaaagtggataaacgcgtagaaccgaaatcgtgtgataaaactcacacatgcccgccatgcccggcacctgaactgcttggtggtcccagcgtgttcctgttcccgccgaagcctaaagatactctaatgatcagccgtacgccagaggtgacatgtgtcgtggttgacgtgtcccacgaagatcccgaagttaagttcaattggtatgttgatggtgtagaggtacacaatgctaagactaaacctcgcgaggagcagtacgcctcgacctatcgtgtcgtgagcgttctgaccgtccttcaccaagattggcttaacggcaaagaatataagtgcaaggtaagcaataaagcacttccggccccaatcgagaaaaccatttccaaggccaaaggtcaaccaagagaaccccaggtgtatactcttccgccttctcgtgaggaaatgactaaaaatcaagtatcccttacgtgtctggttaaaggtttttatcctagcgatattgctgttgaatgggaatcgaacggtcagccggagaataattataaaacaacgccacccgtcctggatagcgacggctcattttttctgtatagcaaactgactgtagataaatcacggtggcagcagggcaatgtattcagttgctccgttatgcatgaagcgttacataatcactacacgcagaaatctcttagtctttcacccggt

SEQ ID NO: 432 - protein, 214 aa, Synthetic construct
DIQMTQSPSSLSASVGDRVTITCRASQNIGSYLNWYQQKPGNAPKLLIYATSTLQSGVPSRFSGSGSGTDFTLIISSLHPEDFTVYYCQQSFIIPFTFGPGTKVDIKRTVAAPSVFIFPPSDEQLKSGTASVVCLLNNFYPREAKVQWKVDNALQSGNSQESVTEQDSKDSTYSLSSTLTLSKADYEKHKVYACEVTHQGLSSPVTKSFNRGEC

SEQ ID NO: 433 - protein, 214 aa, Synthetic construct
DIQMTQSPSSLSASVGDRVTITCRASQSINTYLNWYQQKPGKAPKLLIYAASSLQSGVPSRFSGSGSGTDFTLTISSLQPEDFATYSCQHSFTTPFTFGPGTKLEIKRTVAAPSVFIFPPSDEQLKSGTASVVCLLNNFYPREAKVQWKVDNALQSGNSQESVTEQDSKDSTYSLSSTLTLSKADYEKHKVYACEVTHQGLSSPVTKSFNRGEC

SEQ ID NO: 434 - protein, 215 aa, Synthetic construct
EIVLTQSPGTLSLSPGERATLSCRASQSVSSSYLAWYQQKPGQAPRLLIYGASSRATGIPDRFSGSGSGTQFTLTISSLQSEDFAVYYCQQYGSSPWTFGQGTKVDIKRTVAAPSVFIFPPSDEQLKSGTASVVCLLNNFYPREAKVQWKVDNALQSGNSQESVTEQDSKDSTYSLSSTLTLSKADYEKHKVYACEVTHQGLSSPVTKSFNRGEC

SEQ ID NO: 435 - protein, 214 aa, Synthetic construct
DIQMTQSPSSLSASIGDRVTITCRASQSISSYLDWYQRKSGKAPKLLIYAASSLQSGVPSRFSGSGSGTDFTLTISSLQPEDFATYYCQQSYSTPLTFGGGTKVDIKRTVAAPSVFIFPPSDEQLKSGTASVVCLLNNFYPREAKVQWKVDNALQSGNSQESVTEQDSKDSTYSLSSTLTLSKADYEKHKVYACEVTHQGLSSPVTKSFNRGEC

SEQ ID NO: 436 - protein, 214 aa, Synthetic construct
DIQMTQSPSSLSASVGDRVTITCRASQSINIYLNWYQQKPEKDPKLLIYAASSLQSGVPSRFSGSGSGTDFTLTISNLQPEDFATYYCQQSYSTPITFGQGTRLEIKRTVAAPSVFIFPPSDEQLKSGTASVVCLLNNFYPREAKVQWKVDNALQSGNSQESVTEQDSKDSTYSLSSTLTLSKADYEKHKVYACEVTHQGLSSPVTKSFNRGEC

SEQ ID NO: 437 - protein, 214 aa, Synthetic construct
DIQMTQSPSSLSASVGDRGTITCRASQSIRSYLNWYQQKPGKAPKLLIYAASSLQSGVPSRFSGSGSGTDFTLTISSLQPEDFATYYCQQSYRTPVTFGPGTKVDIKRTVAAPSVFIFPPSDEQLKSGTASVVCLLNNFYPREAKVQWKVDNALQSGNSQESVTEQDSKDSTYSLSSTLTLSKADYEKHKVYACEVTHQGLSSPVTKSFNRGEC

SEQ ID NO: 438 - DNA, 642 bp, Synthetic construct
  source 1..642: mol_type = other DNA
gacatccagatgacccagtctccgtcctccctgtctgcatctgtaggagacagagtcaccatcacttgccgggcaagtcagaacattggcagttatttaaattggtatcagcagaaaccagggaatgcccctaaactcctgatctatgctacatccactttgcaaagtggggtcccatcaaggttcagtggcagtggatctgggacagatttcactctcatcatcagcagtctgcaccctgaagattttacagtttattactgtcaacagagtttcattatcccattcactttcggccctgggaccaaagtggatatcaaacgtacggtagctgccccttcagtttttatctttccgccgtctgacgagcagttaaaatccgggaccgcttctgtagtttgcctgctgaataatttttatccgcgtgaggctaaagtacaatggaaagtcgacaatgctttgcagtcgggaaattcacaggaaagtgttacggagcaggattctaaagattccacatattcactcagctccacccttacactgagcaaagccgactatgaaaaacataaagtttacgcatgtgaggtgacgcaccaaggattatccagtccggtcacaaaatcgtttaaccgcggtgagtgt

SEQ ID NO: 439 - DNA, 642 bp, Synthetic construct
  source 1..642: mol_type = other DNA
gacatccagatgactcagtctccatcctccctgtctgcatctgttggagacagagtcaccatcacttgccgggcaagtcagagcattaacacctatttaaattggtatcagcagaaaccagggaaagcccctaagctcctgatctatgctgcatccagtttgcaaagtggggtcccatcaaggttcagtggcagtggatctgggacagatttcactctcaccatcagcagtctgcaacctgaagattttgcaacttactcctgtcaacatagtttcactaccccattcactttcggccctgggaccaagctggaaatcaaacgtacggtagctgccccttcagtttttatctttccgccgtctgacgagcagttaaaatccgggaccgcttctgtagtttgcctgctgaataatttttatccgcgtgaggctaaagtacaatggaaagtcgacaatgctttgcagtcgggaaattcacaggaaagtgttacggagcaggattctaaagattccacatattcactcagctccacccttacactgagcaaagccgactatgaaaaacataaagtttacgcatgtgaggtgacgcaccaaggattatccagtccggtcacaaaatcgtttaaccgcggtgagtgt

SEQ ID NO: 440 - DNA, 645 bp, Synthetic construct
  source 1..645: mol_type = other DNA
gaaattgtgttgacgcagtctccaggcaccctgtctttgtctccaggggaaagagccaccctctcctgcagggccagtcagagtgttagcagcagctacttagcctggtaccagcagaaacctggccaggctcccaggctcctcatctatggtgcatccagtagggccactggcatcccagacaggttcagtggcagtgggtctgggacacagttcactctcaccatcagcagcctgcagtctgaagattttgcagtttattactgtcagcagtatggtagctcaccgtggacgttcggccaagggaccaaagtggatatcaaacgtacggtagctgccccttcagtttttatctttccgccgtctgacgagcagttaaaatccgggaccgcttctgtagtttgcctgctgaataatttttatccgcgtgaggctaaagtacaatggaaagtcgacaatgctttgcagtcgggaaattcacaggaaagtgttacggagcaggattctaaagattccacatattcactcagctccacccttacactgagcaaagccgactatgaaaaacataaagtttacgcatgtgaggtgacgcaccaaggattatccagtccggtcacaaaatcgtttaaccgcggtgagtgt

SEQ ID NO: 441 - DNA, 642 bp, Synthetic construct
  source 1..642: mol_type = other DNA
gacatccagatgacccagtctccatcctccctgtctgcatctattggagacagagtcaccatcacttgccgggcaagtcagagcattagcagctatttagattggtatcagcggaaatcagggaaagcccctaaactcctgatctatgctgcatccagtttgcaaagtggggtcccatcaaggttcagtggcagtggatctgggacagatttcactctcaccatcagcagtctgcaacctgaagattttgcaacttactactgtcaacagagttacagtaccccgctcactttcggcggagggaccaaagtggatatcaaacgtacggtagctgccccttcagtttttatctttccgccgtctgacgagcagttaaaatccgggaccgcttctgtagtttgcctgctgaataatttttatccgcgtgaggctaaagtacaatggaaagtcgacaatgctttgcagtcgggaaattcacaggaaagtgttacggagcaggattctaaagattccacatattcactcagctccacccttacactgagcaaagccgactatgaaaaacataaagtttacgcatgtgaggtgacgcaccaaggattatccagtccggtcacaaaatcgtttaaccgcggtgagtgt

SEQ ID NO: 442 - DNA, 642 bp, Synthetic construct
  source 1..642: mol_type = other DNA
gacatccagatgacccagtctccatcctccctgtctgcatctgtaggagacagagtcaccatcacttgccgggcaagtcagagcattaatatctatttaaattggtatcagcagaaaccagagaaagaccctaagctcctgatctatgctgcgtccagtttgcaaagtggggtcccatcaaggttcagtggcagtggatctgggacagatttcactctcaccatcagcaatctgcaacctgaagattttgcaacttactactgtcaacagagttacagtaccccgatcaccttcggccaagggacacgactggagattaaacgtacggtagctgccccttcagtttttatctttccgccgtctgacgagcagttaaaatccgggaccgcttctgtagtttgcctgctgaataatttttatccgcgtgaggctaaagtacaatggaaagtcgacaatgctttgcagtcgggaaattcacaggaaagtgttacggagcaggattctaaagattccacatattcactcagctccacccttacactgagcaaagccgactatgaaaaacataaagtttacgcatgtgaggtgacgcaccaaggattatccagtccggtcacaaaatcgtttaaccgcggtgagtgt

SEQ ID NO: 443 - DNA, 642 bp, Synthetic construct
  source 1..642: mol_type = other DNA
gacatccagatgacacagtctccatcctccctgtctgcatctgtaggagacagaggcaccatcacttgccgggcaagtcagagcattagaagttatttaaattggtatcagcagaaaccagggaaagcccctaaactcctgatctatgctgcatccagtttgcaaagtggggtcccatcaaggttcagtggcagtggatctgggacagatttcactctcaccatcagcagtctgcaacctgaagattttgcaacttactactgtcaacagagttacagaaccccagtcactttcggccctgggaccaaagtggatatcaaacgtacggtagctgccccttcagtttttatctttccgccgtctgacgagcagttaaaatccgggaccgcttctgtagtttgcctgctgaataatttttatccgcgtgaggctaaagtacaatggaaagtcgacaatgctttgcagtcgggaaattcacaggaaagtgttacggagcaggattctaaagattccacatattcactcagctccacccttacactgagcaaagccgactatgaaaaacataaagtttacgcatgtgaggtgacgcaccaaggattatccagtccggtcacaaaatcgtttaaccgcggtgagtgt

SEQ ID NO: 444 - protein, 448 aa, Synthetic construct
EVQLVESGGGLVKPGGSLRLSCAASGFTFSSYTMNWVRQAPGKGLEWVSSISSSSSYTYYADSVRGRFTISRDNAKNSLYLQMSSLRAEDTAVYYCARSASIAAGMDVWGKGTTVTVSSASTKGPSVFPLAPSSKSTSGGTAALGCLVKDYFPEPVTVSWNSGALTSGVHTFPAVLQSSGLYSLSSVVTVPSSSLGTQTYICNVNHKPSNTKVDKRVEPKSCDKTHTCPPCPAPELLGGPSVFLFPPKPKDTLMISRTPEVTCVVVDVSHEDPEVKFNWYVDGVEVHNAKTKPREEQYASTYRVVSVLTVLHQDWLNGKEYKCKVSNKALPAPIEKTISKAKGQPREPQVYTLPPSREEMTKNQVSLTCLVKGFYPSDIAVEWESNGQPENNYKTTPPVLDSDGSFFLYSKLTVDKSRWQQGNVFSCSVMHEALHNHYTQKSLSLSPG

SEQ ID NO: 445 - protein, 448 aa, Synthetic construct
EVQLVESGGGLVQPGGSLRLSCAASGFPFSSYVMSWVRQAPGKGLEWVSVISVSGGSTFYADSVRGRFTISRDNSKNTLYLQVYSLRAEDTAVYYCAKDGLAVAGFDHWGQGTLVTVSSASTKGPSVFPLAPSSKSTSGGTAALGCLVKDYFPEPVTVSWNSGALTSGVHTFPAVLQSSGLYSLSSVVTVPSSSLGTQTYICNVNHKPSNTKVDKRVEPKSCDKTHTCPPCPAPELLGGPSVFLFPPKPKDTLMISRTPEVTCVVVDVSHEDPEVKFNWYVDGVEVHNAKTKPREEQYASTYRVVSVLTVLHQDWLNGKEYKCKVSNKALPAPIEKTISKAKGQPREPQVYTLPPSREEMTKNQVSLTCLVKGFYPSDIAVEWESNGQPENNYKTTPPVLDSDGSFFLYSKLTVDKSRWQQGNVFSCSVMHEALHNHYTQKSLSLSPG

SEQ ID NO: 446 - protein, 448 aa, Synthetic construct
EVQLVESGGGLVQRGGSLRLSCVASGFTFSSYAMSWVRQAPGKGLEWVSVISGSGGTTYYADSVKGRFTISRDDSKKTLYLQMNSLRAEDTAVYYCAKRGDYGDYMDVWGKGTTVTVSSASTKGPSVFPLAPSSKSTSGGTAALGCLVKDYFPEPVTVSWNSGALTSGVHTFPAVLQSSGLYSLSSVVTVPSSSLGTQTYICNVNHKPSNTKVDKRVEPKSCDKTHTCPPCPAPELLGGPSVFLFPPKPKDTLMISRTPEVTCVVVDVSHEDPEVKFNWYVDGVEVHNAKTKPREEQYASTYRVVSVLTVLHQDWLNGKEYKCKVSNKALPAPIEKTISKAKGQPREPQVYTLPPSREEMTKNQVSLTCLVKGFYPSDIAVEWESNGQPENNYKTTPPVLDSDGSFFLYSKLTVDKSRWQQGNVFSCSVMHEALHNHYTQKSLSLSPG

SEQ ID NO: 447 - protein, 453 aa, Synthetic construct
QVQLVESGGGVVQPGRSLRLSCAASGFTFNTYGIHWVRQAPGKGLEWVAVIWHDGSSKNYVDSVTGRFTISRDNSKNTVYLQMNSLRAEDTAVYYCARRGNWNYGFYYYYMDVWGKGTTVTVSSASTKGPSVFPLAPSSKSTSGGTAALGCLVKDYFPEPVTVSWNSGALTSGVHTFPAVLQSSGLYSLSSVVTVPSSSLGTQTYICNVNHKPSNTKVDKRVEPKSCDKTHTCPPCPAPELLGGPSVFLFPPKPKDTLMISRTPEVTCVVVDVSHEDPEVKFNWYVDGVEVHNAKTKPREEQYASTYRVVSVLTVLHQDWLNGKEYKCKVSNKALPAPIEKTISKAKGQPREPQVYTLPPSREEMTKNQVSLTCLVKGFYPSDIAVEWESNGQPENNYKTTPPVLDSDGSFFLYSKLTVDKSRWQQGNVFSCSVMHEALHNHYTQKSLSLSPG

SEQ ID NO: 448 - protein, 448 aa, Synthetic construct
EVQLVESGGGLVQPGGSLRLSCAASGFTFSRYSMNWVRQAPGKGLEWVSYISSSSSTIFHADSVKGRFTISRDNAKNSLYLQMNSLRDEDTAVYYCARGNWNYYYMDVWGKGTTVTVSSASTKGPSVFPLAPSSKSTSGGTAALGCLVKDYFPEPVTVSWNSGALTSGVHTFPAVLQSSGLYSLSSVVTVPSSSLGTQTYICNVNHKPSNTKVDKRVEPKSCDKTHTCPPCPAPELLGGPSVFLFPPKPKDTLMISRTPEVTCVVVDVSHEDPEVKFNWYVDGVEVHNAKTKPREEQYASTYRVVSVLTVLHQDWLNGKEYKCKVSNKALPAPIEKTISKAKGQPREPQVYTLPPSREEMTKNQVSLTCLVKGFYPSDIAVEWESNGQPENNYKTTPPVLDSDGSFFLYSKLTVDKSRWQQGNVFSCSVMHEALHNHYTQKSLSLSPG

SEQ ID NO: 449 - protein, 452 aa, Synthetic construct
EVQLVESGGGLAQFGRSLRLSCAASGFTFDDYAMHWLRQAPGMGLEWVSGISWNSGSIGYADSVKGRFTIARDNAKNSVHLQMNSLRAEDTALYYCAKDIGNGYTKGDVFDIWGQGTMVTVSSASTKGPSVFPLAPSSKSTSGGTAALGCLVKDYFPEPVTVSWNSGALTSGVHTFPAVLQSSGLYSLSSVVTVPSSSLGTQTYICNVNHKPSNTKVDKRVEPKSCDKTHTCPPCPAPELLGGPSVFLFPPKPKDTLMISRTPEVTCVVVDVSHEDPEVKFNWYVDGVEVHNAKTKPREEQYASTYRVVSVLTVLHQDWLNGKEYKCKVSNKALPAPIEKTISKAKGQPREPQVYTLPPSREEMTKNQVSLTCLVKGFYPSDIAVEWESNGQPENNYKTTPPVLDSDGSFFLYSKLTVDKSRWQQGNVFSCSVMHEALHNHYTQKSLSLSPG

SEQ ID NO: 450 - protein, 448 aa, Synthetic construct
EVQLVESGGGLVQPGRSLRLSCTASGFTFDDYEMHWVRQAPGKGLEWVSDISRNSGRIGYADSVKGRFTISRDNAKNSLYLQMNSLRAEDTALYYCAKDIWGSGYFDYWGQGILVTVSSASTKGPSVFPLAPSSKSTSGGTAALGCLVKDYFPEPVTVSWNSGALTSGVHTFPAVLQSSGLYSLSSVVTVPSSSLGTQTYICNVNHKPSNTKVDKRVEPKSCDKTHTCPPCPAPELLGGPSVFLFPPKPKDTLMISRTPEVTCVVVDVSHEDPEVKFNWYVDGVEVHNAKTKPREEQYASTYRVVSVLTVLHQDWLNGKEYKCKVSNKALPAPIEKTISKAKGQPREPQVYTLPPSREEMTKNQVSLTCLVKGFYPSDIAVEWESNGQPENNYKTTPPVLDSDGSFFLYSKLTVDKSRWQQGNVFSCSVMHEALHNHYTQKSLSLSPG

SEQ ID NO: 451 - protein, 452 aa, Synthetic construct
EVQLVESGGGLVQPGRSLRLSCAASGFTFEDYAMHWVRQAPGKGLEWVSGISWNSGSIGYADSVKGRFTISRDNAKKSLYLQMNSLRAEDTALYYCTKDRDDGYNYAGVFDYWGQGTLVTVSSASTKGPSVFPLAPSSKSTSGGTAALGCLVKDYFPEPVTVSWNSGALTSGVHTFPAVLQSSGLYSLSSVVTVPSSSLGTQTYICNVNHKPSNTKVDKRVEPKSCDKTHTCPPCPAPELLGGPSVFLFPPKPKDTLMISRTPEVTCVVVDVSHEDPEVKFNWYVDGVEVHNAKTKPREEQYASTYRVVSVLTVLHQDWLNGKEYKCKVSNKALPAPIEKTISKAKGQPREPQVYTLPPSREEMTKNQVSLTCLVKGFYPSDIAVEWESNGQPENNYKTTPPVLDSDGSFFLYSKLTVDKSRWQQGNVFSCSVMHEALHNHYTQKSLSLSPG

SEQ ID NO: 452 - protein, 452 aa, Synthetic construct
EVQLVESGGGLVQPGRSLRLSCAASGFSFDDYAMHWVRQVPGKGLEWVSGISWTGGSVGYADPVKGRFTISRDNAKNSLYLQMNSLRPEDTALYYCAKDMGDGYSRNWPFDYWGQGTLVTVSSASTKGPSVFPLAPSSKSTSGGTAALGCLVKDYFPEPVTVSWNSGALTSGVHTFPAVLQSSGLYSLSSVVTVPSSSLGTQTYICNVNHKPSNTKVDKRVEPKSCDKTHTCPPCPAPELLGGPSVFLFPPKPKDTLMISRTPEVTCVVVDVSHEDPEVKFNWYVDGVEVHNAKTKPREEQYASTYRVVSVLTVLHQDWLNGKEYKCKVSNKALPAPIEKTISKAKGQPREPQVYTLPPSREEMTKNQVSLTCLVKGFYPSDIAVEWESNGQPENNYKTTPPVLDSDGSFFLYSKLTVDKSRWQQGNVFSCSVMHEALHNHYTQKSLSLSPG

SEQ ID NO: 453 - protein, 452 aa, Synthetic construct
EVQLVESGGGLVQPGRSLRLSCAASGFTFDDYAMHWVRQVPGRGLEWVSGISWSGGSIGYADSVKGRFTISRDNSKNSLYLQMNSLRAEDTALYYCTKDREDGYNYGGVFDYWGQGTLVTVSSASTKGPSVFPLAPSSKSTSGGTAALGCLVKDYFPEPVTVSWNSGALTSGVHTFPAVLQSSGLYSLSSVVTVPSSSLGTQTYICNVNHKPSNTKVDKRVEPKSCDKTHTCPPCPAPELLGGPSVFLFPPKPKDTLMISRTPEVTCVVVDVSHEDPEVKFNWYVDGVEVHNAKTKPREEQYASTYRVVSVLTVLHQDWLNGKEYKCKVSNKALPAPIEKTISKAKGQPREPQVYTLPPSREEMTKNQVSLTCLVKGFYPSDIAVEWESNGQPENNYKTTPPVLDSDGSFFLYSKLTVDKSRWQQGNVFSCSVMHEALHNHYTQKSLSLSPG

SEQ ID NO: 454 - DNA, 1344 bp, Synthetic construct
  source 1..1344: mol_type = other DNA
gaggtgcagctggtggagtctgggggaggcctggtcaagcctggggggtccctgagactctcctgtgcagcctctggattcaccttcagtagctataccatgaactgggtccgccaggctccagggaaggggctggagtgggtgtcatccattagtagtagtagtagttacacatactacgcagactcagtgaggggccgattcaccatctccagagacaacgccaagaactcactgtatctgcaaatgagcagcctgagagccgaggacacagctgtgtattactgtgcgagatcggcgagtatagcagctgggatggacgtctggggcaaagggaccacggtcaccgtctcctcagctagcactaaagggccttctgtatttcccttggccccgtccagcaaatcgacctcgggagggacagccgccctgggttgccttgtgaaagattatttccctgagccagttaccgtaagttggaacagtggggcgctgacaagtggtgtgcacacgtttcctgccgtcctgcaatcatcgggcttgtatagcctcagctctgtggtcactgtcccaagttcatcgctgggcactcagacgtatatttgcaatgtgaaccacaaaccttcaaatacaaaagtggataaacgcgtagaaccgaaatcgtgtgataaaactcacacatgcccgccatgcccggcacctgaactgcttggtggtcccagcgtgttcctgttcccgccgaagcctaaagatactctaatgatcagccgtacgccagaggtgacatgtgtcgtggttgacgtgtcccacgaagatcccgaagttaagttcaattggtatgttgatggtgtagaggtacacaatgctaagactaaacctcgcgaggagcagtacgcctcgacctatcgtgtcgtgagcgttctgaccgtccttcaccaagattggcttaacggcaaagaatataagtgcaaggtaagcaataaagcacttccggccccaatcgagaaaaccatttccaaggccaaaggtcaaccaagagaaccccaggtgtatactcttccgccttctcgtgaggaaatgactaaaaatcaagtatcccttacgtgtctggttaaaggtttttatcctagcgatattgctgttgaatgggaatcgaacggtcagccggagaataattataaaacaacgccacccgtcctggatagcgacggctcattttttctgtatagcaaactgactgtagataaatcacggtggcagcagggcaatgtattcagttgctccgttatgcatgaagcgttacataatcactacacgcagaaatctcttagtctttcacccggt

SEQ ID NO: 455 - DNA, 1344 bp, Synthetic construct
  source 1..1344: mol_type = other DNA
gaggtgcagctggtggagtctgggggaggcttggtacagccgggggggtccctgagactctcctgtgcagcctctggattcccctttagcagctatgtcatgagctgggtccgccaggctccagggaaggggctggagtgggtctcagttataagtgttagtggtggtagtacattctacgcagactccgtgaggggccggttcaccatctccagagacaattccaagaacacgctgtatctgcaagtgtacagcctgcgagccgaggacacggccgtatattactgtgcgaaagatggtttggcagtggctggttttgaccactggggccagggaaccctggtcaccgtctcctcagctagcactaaagggccttctgtatttcccttggccccgtccagcaaatcgacctcgggagggacagccgccctgggttgccttgtgaaagattatttccctgagccagttaccgtaagttggaacagtggggcgctgacaagtggtgtgcacacgtttcctgccgtcctgcaatcatcgggcttgtatagcctcagctctgtggtcactgtcccaagttcatcgctgggcactcagacgtatatttgcaatgtgaaccacaaaccttcaaatacaaaagtggataaacgcgtagaaccgaaatcgtgtgataaaactcacacatgcccgccatgcccggcacctgaactgcttggtggtcccagcgtgttcctgttcccgccgaagcctaaagatactctaatgatcagccgtacgccagaggtgacatgtgtcgtggttgacgtgtcccacgaagatcccgaagttaagttcaattggtatgttgatggtgtagaggtacacaatgctaagactaaacctcgcgaggagcagtacgcctcgacctatcgtgtcgtgagcgttctgaccgtccttcaccaagattggcttaacggcaaagaatataagtgcaaggtaagcaataaagcacttccggccccaatcgagaaaaccatttccaaggccaaaggtcaaccaagagaaccccaggtgtatactcttccgccttctcgtgaggaaatgactaaaaatcaagtatcccttacgtgtctggttaaaggtttttatcctagcgatattgctgttgaatgggaatcgaacggtcagccggagaataattataaaacaacgccacccgtcctggatagcgacggctcattttttctgtatagcaaactgactgtagataaatcacggtggcagcagggcaatgtattcagttgctccgttatgcatgaagcgttacataatcactacacgcagaaatctcttagtctttcacccggt

SEQ ID NO: 456 - DNA, 1344 bp, Synthetic construct
  source 1..1344: mol_type = other DNA
gaggtgcagctggtggagtctgggggaggcttggtacagcggggggggtccctgagactctcctgtgtagcctctggattcacctttagtagctatgccatgagctgggtccgccaggctccagggaaggggctggagtgggtctcagttattagtggtagtggtggtaccacatactacgcagactccgtgaagggccggttcaccatctccagagacgattccaagaagacactgtatctgcaaatgaacagcctgagagccgaggacacggccgtatattattgtgcgaaaaggggtgactacggggactacatggacgtctggggcaaagggaccacggtcaccgtctcctcagctagcactaaagggccttctgtatttcccttggccccgtccagcaaatcgacctcgggagggacagccgccctgggttgccttgtgaaagattatttccctgagccagttaccgtaagttggaacagtggggcgctgacaagtggtgtgcacacgtttcctgccgtcctgcaatcatcgggcttgtatagcctcagctctgtggtcactgtcccaagttcatcgctgggcactcagacgtatatttgcaatgtgaaccacaaaccttcaaatacaaaagtggataaacgcgtagaaccgaaatcgtgtgataaaactcacacatgcccgccatgcccggcacctgaactgcttggtggtcccagcgtgttcctgttcccgccgaagcctaaagatactctaatgatcagccgtacgccagaggtgacatgtgtcgtggttgacgtgtcccacgaagatcccgaagttaagttcaattggtatgttgatggtgtagaggtacacaatgctaagactaaacctcgcgaggagcagtacgcctcgacctatcgtgtcgtgagcgttctgaccgtccttcaccaagattggcttaacggcaaagaatataagtgcaaggtaagcaataaagcacttccggccccaatcgagaaaaccatttccaaggccaaaggtcaaccaagagaaccccaggtgtatactcttccgccttctcgtgaggaaatgactaaaaatcaagtatcccttacgtgtctggttaaaggtttttatcctagcgatattgctgttgaatgggaatcgaacggtcagccggagaataattataaaacaacgccacccgtcctggatagcgacggctcattttttctgtatagcaaactgactgtagataaatcacggtggcagcagggcaatgtattcagttgctccgttatgcatgaagcgttacataatcactacacgcagaaatctcttagtctttcacccggt

SEQ ID NO: 457 - DNA, 1359 bp, Synthetic construct
  source 1..1359: mol_type = other DNA
caggtgcagctggtggagtctgggggaggcgtggtccagcctgggaggtccctgagactctcctgtgcagcgtctggattcaccttcaatacctatggcatccactgggtccgccaggctccaggcaagggactggagtgggtggcagttatatggcatgatggaagtagtaaaaactatgtagactccgtgacgggccgattcaccatctccagagacaattccaagaacacggtgtatctgcaaatgaacagcctgagagccgaggacacggctgtttattactgtgcgagaaggggtaactggaactacggcttctactactactacatggacgtctggggcaaaggaaccacggtcaccgtctcctcagctagcactaaagggccttctgtatttcccttggccccgtccagcaaatcgacctcgggagggacagccgccctgggttgccttgtgaaagattatttccctgagccagttaccgtaagttggaacagtggggcgctgacaagtggtgtgcacacgtttcctgccgtcctgcaatcatcgggcttgtatagcctcagctctgtggtcactgtcccaagttcatcgctgggcactcagacgtatatttgcaatgtgaaccacaaaccttcaaatacaaaagtggataaacgcgtagaaccgaaatcgtgtgataaaactcacacatgcccgccatgcccggcacctgaactgcttggtggtcccagcgtgttcctgttcccgccgaagcctaaagatactctaatgatcagccgtacgccagaggtgacatgtgtcgtggttgacgtgtcccacgaagatcccgaagttaagttcaattggtatgttgatggtgtagaggtacacaatgctaagactaaacctcgcgaggagcagtacgcctcgacctatcgtgtcgtgagcgttctgaccgtccttcaccaagattggcttaacggcaaagaatataagtgcaaggtaagcaataaagcacttccggccccaatcgagaaaaccatttccaaggccaaaggtcaaccaagagaaccccaggtgtatactcttccgccttctcgtgaggaaatgactaaaaatcaagtatcccttacgtgtctggttaaaggtttttatcctagcgatattgctgttgaatgggaatcgaacggtcagccggagaataattataaaacaacgccacccgtcctggatagcgacggctcattttttctgtatagcaaactgactgtagataaatcacggtggcagcagggcaatgtattcagttgctccgttatgcatgaagcgttacataatcactacacgcagaaatctcttagtctttcacccggt

SEQ ID NO: 458 - DNA, 1344 bp, Synthetic construct
  source 1..1344: mol_type = other DNA
gaggtgcagctggtggagtctgggggaggtttggtacagcctggggggtccctgagactctcctgtgcagcctctggattcaccttcagtagatatagcatgaactgggtccgccaggctccagggaaggggctggagtgggtttcatacattagtagtagtagtagtaccattttccatgcagactctgtgaagggccgattcaccatctccagagacaatgccaagaactcactgtacctgcaaatgaacagcctgagagacgaggacacggctgtgtattactgtgcgagagggaactggaactactactacatggacgtctggggcaaagggaccacggtcaccgtctcctcagctagcactaaagggccttctgtatttcccttggccccgtccagcaaatcgacctcgggagggacagccgccctgggttgccttgtgaaagattatttccctgagccagttaccgtaagttggaacagtggggcgctgacaagtggtgtgcacacgtttcctgccgtcctgcaatcatcgggcttgtatagcctcagctctgtggtcactgtcccaagttcatcgctgggcactcagacgtatatttgcaatgtgaaccacaaaccttcaaatacaaaagtggataaacgcgtagaaccgaaatcgtgtgataaaactcacacatgcccgccatgcccggcacctgaactgcttggtggtcccagcgtgttcctgttcccgccgaagcctaaagatactctaatgatcagccgtacgccagaggtgacatgtgtcgtggttgacgtgtcccacgaagatcccgaagttaagttcaattggtatgttgatggtgtagaggtacacaatgctaagactaaacctcgcgaggagcagtacgcctcgacctatcgtgtcgtgagcgttctgaccgtccttcaccaagattggcttaacggcaaagaatataagtgcaaggtaagcaataaagcacttccggccccaatcgagaaaaccatttccaaggccaaaggtcaaccaagagaaccccaggtgtatactcttccgccttctcgtgaggaaatgactaaaaatcaagtatcccttacgtgtctggttaaaggtttttatcctagcgatattgctgttgaatgggaatcgaacggtcagccggagaataattataaaacaacgccacccgtcctggatagcgacggctcattttttctgtatagcaaactgactgtagataaatcacggtggcagcagggcaatgtattcagttgctccgttatgcatgaagcgttacataatcactacacgcagaaatctcttagtctttcacccggt

SEQ ID NO: 459 - DNA, 1356 bp, Synthetic construct
  source 1..1356: mol_type = other DNA
gaagtgcagctggtggagtctgggggaggcttggcacagtttggcaggtccctgagactctcctgtgcagcctctggattcacctttgatgattatgccatgcactggctccggcaagctccagggatgggcctggagtgggtctcaggtattagttggaatagcgggagcataggctatgcggactctgtgaagggccgattcaccatcgccagagacaacgccaagaactccgtgcatctgcaaatgaacagtctgagagctgaggacacggccttgtattactgtgcaaaagatataggaaatggatatacgaagggtgatgtttttgatatctggggacaagggacaatggtcaccgtctcttcagctagcactaaagggccttctgtatttcccttggccccgtccagcaaatcgacctcgggagggacagccgccctgggttgccttgtgaaagattatttccctgagccagttaccgtaagttggaacagtggggcgctgacaagtggtgtgcacacgtttcctgccgtcctgcaatcatcgggcttgtatagcctcagctctgtggtcactgtcccaagttcatcgctgggcactcagacgtatatttgcaatgtgaaccacaaaccttcaaatacaaaagtggataaacgcgtagaaccgaaatcgtgtgataaaactcacacatgcccgccatgcccggcacctgaactgcttggtggtcccagcgtgttcctgttcccgccgaagcctaaagatactctaatgatcagccgtacgccagaggtgacatgtgtcgtggttgacgtgtcccacgaagatcccgaagttaagttcaattggtatgttgatggtgtagaggtacacaatgctaagactaaacctcgcgaggagcagtacgcctcgacctatcgtgtcgtgagcgttctgaccgtccttcaccaagattggcttaacggcaaagaatataagtgcaaggtaagcaataaagcacttccggccccaatcgagaaaaccatttccaaggccaaaggtcaaccaagagaaccccaggtgtatactcttccgccttctcgtgaggaaatgactaaaaatcaagtatcccttacgtgtctggttaaaggtttttatcctagcgatattgctgttgaatgggaatcgaacggtcagccggagaataattataaaacaacgccacccgtcctggatagcgacggctcattttttctgtatagcaaactgactgtagataaatcacggtggcagcagggcaatgtattcagttgctccgttatgcatgaagcgttacataatcactacacgcagaaatctcttagtctttcacccggt

SEQ ID NO: 460 - DNA, 1344 bp, Synthetic construct
  source 1..1344: mol_type = other DNA
gaagtgcagctggtggagtctgggggaggcttggtacagcctggcaggtccctgagactctcctgtacagcctctggattcacatttgatgattatgaaatgcactgggtccggcaagctccagggaagggcctggagtgggtctcagatattagtcggaacagtggtagaataggctatgcggactctgtgaagggccgattcaccatttccagagacaacgccaagaactccctgtatctacaaatgaacagtctgagagctgaggacacggccttgtattactgtgcaaaagatatttggggatcggggtactttgactattggggccagggaatcctggtcaccgtctcctcagctagcactaaagggccttctgtatttcccttggccccgtccagcaaatcgacctcgggagggacagccgccctgggttgccttgtgaaagattatttccctgagccagttaccgtaagttggaacagtggggcgctgacaagtggtgtgcacacgtttcctgccgtcctgcaatcatcgggcttgtatagcctcagctctgtggtcactgtcccaagttcatcgctgggcactcagacgtatatttgcaatgtgaaccacaaaccttcaaatacaaaagtggataaacgcgtagaaccgaaatcgtgtgataaaactcacacatgcccgccatgcccggcacctgaactgcttggtggtcccagcgtgttcctgttcccgccgaagcctaaagatactctaatgatcagccgtacgccagaggtgacatgtgtcgtggttgacgtgtcccacgaagatcccgaagttaagttcaattggtatgttgatggtgtagaggtacacaatgctaagactaaacctcgcgaggagcagtacgcctcgacctatcgtgtcgtgagcgttctgaccgtccttcaccaagattggcttaacggcaaagaatataagtgcaaggtaagcaataaagcacttccggccccaatcgagaaaaccatttccaaggccaaaggtcaaccaagagaaccccaggtgtatactcttccgccttctcgtgaggaaatgactaaaaatcaagtatcccttacgtgtctggttaaaggtttttatcctagcgatattgctgttgaatgggaatcgaacggtcagccggagaataattataaaacaacgccacccgtcctggatagcgacggctcattttttctgtatagcaaactgactgtagataaatcacggtggcagcagggcaatgtattcagttgctccgttatgcatgaagcgttacataatcactacacgcagaaatctcttagtctttcacccggt

SEQ ID NO: 461 - DNA, 1356 bp, Synthetic construct
  source 1..1356: mol_type = other DNA
gaagtgcagctggtggagtccgggggaggcttggtacaacctggcaggtccctgagactctcctgtgcagcctctggattcacctttgaagattatgccatgcactgggtccggcaagctccagggaagggcctggagtgggtctcaggtattagttggaatagtggtagcataggctatgcggactctgtgaagggccgattcaccatctccagagacaacgccaagaaatccctgtatctgcaaatgaacagtctgagagctgaggacacggccttatattactgtacaaaagatagagatgatggctacaactatgcgggggtctttgactactggggccagggaaccctggtcactgtctcctcagctagcactaaagggccttctgtatttcccttggccccgtccagcaaatcgacctcgggagggacagccgccctgggttgccttgtgaaagattatttccctgagccagttaccgtaagttggaacagtggggcgctgacaagtggtgtgcacacgtttcctgccgtcctgcaatcatcgggcttgtatagcctcagctctgtggtcactgtcccaagttcatcgctgggcactcagacgtatatttgcaatgtgaaccacaaaccttcaaatacaaaagtggataaacgcgtagaaccgaaatcgtgtgataaaactcacacatgcccgccatgcccggcacctgaactgcttggtggtcccagcgtgttcctgttcccgccgaagcctaaagatactctaatgatcagccgtacgccagaggtgacatgtgtcgtggttgacgtgtcccacgaagatcccgaagttaagttcaattggtatgttgatggtgtagaggtacacaatgctaagactaaacctcgcgaggagcagtacgcctcgacctatcgtgtcgtgagcgttctgaccgtccttcaccaagattggcttaacggcaaagaatataagtgcaaggtaagcaataaagcacttccggccccaatcgagaaaaccatttccaaggccaaaggtcaaccaagagaaccccaggtgtatactcttccgccttctcgtgaggaaatgactaaaaatcaagtatcccttacgtgtctggttaaaggtttttatcctagcgatattgctgttgaatgggaatcgaacggtcagccggagaataattataaaacaacgccacccgtcctggatagcgacggctcattttttctgtatagcaaactgactgtagataaatcacggtggcagcagggcaatgtattcagttgctccgttatgcatgaagcgttacataatcactacacgcagaaatctcttagtctttcacccggt

SEQ ID NO: 462 - DNA, 1356 bp, Synthetic construct
  source 1..1356: mol_type = other DNA
gaagtgcagctggtggagtctgggggaggcttggtacagcctggcaggtccctgagactctcctgtgcagcctctgggttcagttttgatgattatgccatgcactgggtccggcaagttccagggaagggcctggaatgggtctcaggtattagttggactggtggtagcgtaggctatgcggaccccgtgaagggccgattcaccatctccagagacaacgccaagaactccctgtatctgcaaatgaacagtctgagacctgaggacacggccttgtattactgtgcaaaagatatgggagacgggtatagcagaaactggccctttgactactggggccagggaaccctggtcaccgtctcctcagctagcactaaagggccttctgtatttcccttggccccgtccagcaaatcgacctcgggagggacagccgccctgggttgccttgtgaaagattatttccctgagccagttaccgtaagttggaacagtggggcgctgacaagtggtgtgcacacgtttcctgccgtcctgcaatcatcgggcttgtatagcctcagctctgtggtcactgtcccaagttcatcgctgggcactcagacgtatatttgcaatgtgaaccacaaaccttcaaatacaaaagtggataaacgcgtagaaccgaaatcgtgtgataaaactcacacatgcccgccatgcccggcacctgaactgcttggtggtcccagcgtgttcctgttcccgccgaagcctaaagatactctaatgatcagccgtacgccagaggtgacatgtgtcgtggttgacgtgtcccacgaagatcccgaagttaagttcaattggtatgttgatggtgtagaggtacacaatgctaagactaaacctcgcgaggagcagtacgcctcgacctatcgtgtcgtgagcgttctgaccgtccttcaccaagattggcttaacggcaaagaatataagtgcaaggtaagcaataaagcacttccggccccaatcgagaaaaccatttccaaggccaaaggtcaaccaagagaaccccaggtgtatactcttccgccttctcgtgaggaaatgactaaaaatcaagtatcccttacgtgtctggttaaaggtttttatcctagcgatattgctgttgaatgggaatcgaacggtcagccggagaataattataaaacaacgccacccgtcctggatagcgacggctcattttttctgtatagcaaactgactgtagataaatcacggtggcagcagggcaatgtattcagttgctccgttatgcatgaagcgttacataatcactacacgcagaaatctcttagtctttcacccggt

SEQ ID NO: 463 - DNA, 1356 bp, Synthetic construct
  source 1..1356: mol_type = other DNA
gaagtgcagctggtggagtctgggggaggcttggtacagcctggcaggtccctgagactctcctgtgcagcctctggattcacctttgatgattatgccatgcactgggtccggcaagttccagggaggggcctggagtgggtctcaggtattagttggagtggtggcagcataggctatgcggactctgtgaagggccgattcaccatctccagagacaactccaagaactccctgtatctgcaaatgaacagtctgagagctgaggacacggccttgtattactgtacaaaagatagagaagatggatacaactatgggggggtctttgactactggggccagggaaccctggtcaccgtctcctcagctagcactaaagggccttctgtatttcccttggccccgtccagcaaatcgacctcgggagggacagccgccctgggttgccttgtgaaagattatttccctgagccagttaccgtaagttggaacagtggggcgctgacaagtggtgtgcacacgtttcctgccgtcctgcaatcatcgggcttgtatagcctcagctctgtggtcactgtcccaagttcatcgctgggcactcagacgtatatttgcaatgtgaaccacaaaccttcaaatacaaaagtggataaacgcgtagaaccgaaatcgtgtgataaaactcacacatgcccgccatgcccggcacctgaactgcttggtggtcccagcgtgttcctgttcccgccgaagcctaaagatactctaatgatcagccgtacgccagaggtgacatgtgtcgtggttgacgtgtcccacgaagatcccgaagttaagttcaattggtatgttgatggtgtagaggtacacaatgctaagactaaacctcgcgaggagcagtacgcctcgacctatcgtgtcgtgagcgttctgaccgtccttcaccaagattggcttaacggcaaagaatataagtgcaaggtaagcaataaagcacttccggccccaatcgagaaaaccatttccaaggccaaaggtcaaccaagagaaccccaggtgtatactcttccgccttctcgtgaggaaatgactaaaaatcaagtatcccttacgtgtctggttaaaggtttttatcctagcgatattgctgttgaatgggaatcgaacggtcagccggagaataattataaaacaacgccacccgtcctggatagcgacggctcattttttctgtatagcaaactgactgtagataaatcacggtggcagcagggcaatgtattcagttgctccgttatgcatgaagcgttacataatcactacacgcagaaatctcttagtctttcacccggt

SEQ ID NO: 464 - protein, 219 aa, Synthetic construct
DIVMTQSPLSLPVTPGEPASISCRSSQSLLHSTGYNFLDWYLQKPGLSPQLLIYLASNRASGVPDRFSGSGSGTDFTLKISRVEAEDVGVYYCMQALQTPYTFGQGTKLEIKRTVAAPSVFIFPPSDEQLKSGTASVVCLLNNFYPREAKVQWKVDNALQSGNSQESVTEQDSKDSTYSLSSTLTLSKADYEKHKVYACEVTHQGLSSPVTKSFNRGEC

SEQ ID NO: 465 - protein, 214 aa, Synthetic construct
DIQMTQSPSTLSASVGDRVTITCRASQSISTWLAWYQQKPGKAPKLLIHKASGLESGVPSRFSGSGSGTEFTLTISSLQPDDFATYYCQQYNSFSLIFGGGTRVEIKRTVAAPSVFIFPPSDEQLKSGTASVVCLLNNFYPREAKVQWKVDNALQSGNSQESVTEQDSKDSTYSLSSTLTLSKADYEKHKVYACEVTHQGLSSPVTKSFNRGEC

SEQ ID NO: 466 - protein, 214 aa, Synthetic construct
DIQMTQSPSSVSASVGDRVTITCRASQGITTWLAWYQQKPGKAPKLLIFGASSLESGVPSRFSGSGSGTDFTLTISSLQPEDFATYYCQQANSFPWTFGQGTKVEIKRTVAAPSVFIFPPSDEQLKSGTASVVCLLNNFYPREAKVQWKVDNALQSGNSQESVTEQDSKDSTYSLSSTLTLSKADYEKHKVYACEVTHQGLSSPVTKSFNRGEC

SEQ ID NO: 467 - protein, 219 aa, Synthetic construct
DIVMTQSPLSLPVTPGEPASISCRSSQRLLHSSGYNYLDWYLQKPGQSPQLLIYLGSSRASGVPDRFSGSGSGTDFTLKISRVEAEDVGVYYCMQGLQTPPTFGQGTKVEIKRTVAAPSVFIFPPSDEQLKSGTASVVCLLNNFYPREAKVQWKVDNALQSGNSQESVTEQDSKDSTYSLSSTLTLSKADYEKHKVYACEVTHQGLSSPVTKSFNRGEC

SEQ ID NO: 468 - protein, 213 aa, Synthetic construct
DIQMTQSPSTLSASVGDRVTISCRASQSVNSWLAWYQQKPGKAPKLLIYKASNLEGGVPSSFSGSGSGTEFTLTISSLQPDDFATYYCQQYDTSWTFGQGTKVEIKRTVAAPSVFIFPPSDEQLKSGTASVVCLLNNFYPREAKVQWKVDNALQSGNSQESVTEQDSKDSTYSLSSTLTLSKADYEKHKVYACEVTHQGLSSPVTKSFNRGEC

SEQ ID NO: 469 - protein, 214 aa, Synthetic construct
DIQMTQSPSTLSASVGDSVTITCRASQNIITWLAWYQQKPGKAPNLLIYKASSLESGVPSRFSGSGSGTEFTLTISSLQPDDFATYYCQQYSSYSYTFGQGTKLEIKRTVAAPSVFIFPPSDEQLKSGTASVVCLLNNFYPREAKVQWKVDNALQSGNSQESVTEQDSKDSTYSLSSTLTLSKADYEKHKVYACEVTHQGLSSPVTKSFNRGEC

SEQ ID NO: 470 - protein, 214 aa, Synthetic construct
DIQMTQSPSSVSASVGDRVTITCRTSQGIRNWLAWYQQKPGKAPKLLIYAASSLQTGGPSRFSGSGSGTDFTLTISSLQPEDFATYYCQQANSFPYTFGQGTKLEIKRTVAAPSVFIFPPSDEQLKSGTASVVCLLNNFYPREAKVQWKVDNALQSGNSQESVTEQDSKDSTYSLSSTLTLSKADYEKHKVYACEVTHQGLSSPVTKSFNRGEC

SEQ ID NO: 471 - protein, 213 aa, Synthetic construct
EIVLTQSPATLSVSPGERATLSCRASQSVSSNLAWYQQKPGQAPRLLIYGASSRATGIPDRFSGSGSGTDFTLTISRLEPEDFAVYYCQQYGSSFTFGPGTKVDIKRTVAAPSVFIFPPSDEQLKSGTASVVCLLNNFYPREAKVQWKVDNALQSGNSQESVTEQDSKDSTYSLSSTLTLSKADYEKHKVYACEVTHQGLSSPVTKSFNRGEC

SEQ ID NO: 472 - protein, 221 aa, Synthetic construct
DIVMTQSPDSLAVSLGERATINCKSSQSVLYSSNNKNYLAWYQQKPGQPPKLLIYWASTRESGVPDRFSGSGSGTDFTLTISSLQAEDVAVYYCQQYGSSPMYTFGQGTKLEIKRTVAAPSVFIFPPSDEQLKSGTASVVCLLNNFYPREAKVQWKVDNALQSGNSQESVTEQDSKDSTYSLSSTLTLSKADYEKHKVYACEVTHQGLSSPVTKSFNRGEC

SEQ ID NO: 473 - protein, 214 aa, Synthetic construct
EIVLTQSPGTLSLSPGERATLSCRASQNVRGSYLAWYQQKPGQAPRLLIYGASNRATDIPDRFSGSGSGTDFTLTISGLEPEDFVVYYCQQYGSSYTFGQGTKVEIKRTVAAPSVFIFPPSDEQLKSGTASVVCLLNNFYPREAKVQWKVDNALQSGNSQESVTEQDSKDSTYSLSSTLTLSKADYEKHKVYACEVTHQGLSSPVTKSFNRGEC

SEQ ID NO: 474 - DNA, 657 bp, Synthetic construct
  source 1..657: mol_type = other DNA
gatattgtgatgactcagtctccactctccctgcccgtcacccctggagagccggcctccatctcctgcaggtctagtcagagcctcctgcatagtactggatacaactttttggattggtacctgcagaagccagggctgtctccacagctcctgatctatttggcttctaatcgggcctccggggtccctgacaggttcagtggcagtggatcaggcacagattttacactgaaaatcagcagagtggaggctgaggatgttggggtttattactgcatgcaagctctacaaactccgtacacttttggccaggggaccaagctggagatcaaacgtacggtagctgccccttcagtttttatctttccgccgtctgacgagcagttaaaatccgggaccgcttctgtagtttgcctgctgaataatttttatccgcgtgaggctaaagtacaatggaaagtcgacaatgctttgcagtcgggaaattcacaggaaagtgttacggagcaggattctaaagattccacatattcactcagctccacccttacactgagcaaagccgactatgaaaaacataaagtttacgcatgtgaggtgacgcaccaaggattatccagtccggtcacaaaatcgtttaaccgcggtgagtgt

SEQ ID NO: 475 - DNA, 642 bp, Synthetic construct
  source 1..642: mol_type = other DNA
gacatccagatgacccagtctccttccaccctgtctgcctctgtaggagacagagtcaccatcacttgccgggccagccagagtattagtacctggttggcctggtatcagcagaaaccagggaaagcccctaagctcctgatccataaggcgtctggtttagaaagtggggtcccatcaagattcagcggcagtggatctgggacagaattcactctcaccatcagcagcctgcagcctgatgattttgcaacttattactgccaacagtataatagtttttctctcattttcggcggagggaccagggtggagatcaaacgtacggtagctgccccttcagtttttatctttccgccgtctgacgagcagttaaaatccgggaccgcttctgtagtttgcctgctgaataatttttatccgcgtgaggctaaagtacaatggaaagtcgacaatgctttgcagtcgggaaattcacaggaaagtgttacggagcaggattctaaagattccacatattcactcagctccacccttacactgagcaaagccgactatgaaaaacataaagtttacgcatgtgaggtgacgcaccaaggattatccagtccggtcacaaaatcgtttaaccgcggtgagtgt

SEQ ID NO: 476 - DNA, 642 bp, Synthetic construct
  source 1..642: mol_type = other DNA
gacatccagatgacccagtctccatcttccgtgtctgcatctgtaggagacagagtcaccatcacttgtcgggcgagtcagggtattaccacctggttagcctggtatcagcagaaaccagggaaagcccctaagctcctgatctttggtgcatctagtttggaaagtggggtcccatcaaggttcagcggcagtggatctgggacagatttcactctcaccatcagcagcctgcagcctgaagattttgcaacttactattgtcaacaggctaacagtttcccgtggacgttcggccaagggaccaaggtggaaatcaaacgtacggtagctgccccttcagtttttatctttccgccgtctgacgagcagttaaaatccgggaccgcttctgtagtttgcctgctgaataatttttatccgcgtgaggctaaagtacaatggaaagtcgacaatgctttgcagtcgggaaattcacaggaaagtgttacggagcaggattctaaagattccacatattcactcagctccacccttacactgagcaaagccgactatgaaaaacataaagtttacgcatgtgaggtgacgcaccaaggattatccagtccggtcacaaaatcgtttaaccgcggtgagtgt

SEQ ID NO: 477 - DNA, 657 bp, Synthetic construct
  source 1..657: mol_type = other DNA
gatattgtgatgactcagtctccactctccctgcccgtcacccctggagagccggcctccatctcctgcaggtctagtcagcgcctcctgcatagtagtggatacaattatttggattggtatctgcagaagccaggacagtctccacagctcctgatctatttgggttctagtcgggcctccggggtccctgacaggttcagtggcagtggatcaggcacagattttacactgaaaatcagcagggtggaggctgaggatgttggggtttattactgcatgcaaggtctacaaactcctccgacgttcggccaagggaccaaggtggaaatcaaacgtacggtagctgccccttcagtttttatctttccgccgtctgacgagcagttaaaatccgggaccgcttctgtagtttgcctgctgaataatttttatccgcgtgaggctaaagtacaatggaaagtcgacaatgctttgcagtcgggaaattcacaggaaagtgttacggagcaggattctaaagattccacatattcactcagctccacccttacactgagcaaagccgactatgaaaaacataaagtttacgcatgtgaggtgacgcaccaaggattatccagtccggtcacaaaatcgtttaaccgcggtgagtgt

SEQ ID NO: 478 - DNA, 639 bp, Synthetic construct
  source 1..639: mol_type = other DNA
gacatccagatgacccagtctccttccaccctgtctgcatctgtaggagacagagtcaccatcagttgccgggccagtcagagtgttaatagctggttggcctggtatcagcagaaaccagggaaagcccctaaactcctgatctataaggcgtctaatttagaaggtggggtcccatcaagtttcagcggcagtggatctgggacagaattcactctcaccatcagcagcctgcagcctgatgattttgcaacttattactgccaacaatatgatacttcttggacgttcggccaagggaccaaggtggagatcaaacgtacggtagctgccccttcagtttttatctttccgccgtctgacgagcagttaaaatccgggaccgcttctgtagtttgcctgctgaataatttttatccgcgtgaggctaaagtacaatggaaagtcgacaatgctttgcagtcgggaaattcacaggaaagtgttacggagcaggattctaaagattccacatattcactcagctccacccttacactgagcaaagccgactatgaaaaacataaagtttacgcatgtgaggtgacgcaccaaggattatccagtccggtcacaaaatcgtttaaccgcggtgagtgt

SEQ ID NO: 479 - DNA, 642 bp, Synthetic construct
  source 1..642: mol_type = other DNA
gacatccagatgacccagtctccttccaccctgtctgcatctgtaggagacagcgtcaccatcacttgccgggccagtcagaatattattacctggttggcttggtatcagcagaaaccagggaaagcccctaacctcctgatctataaggcgtctagtttagaaagtggggtcccatcaaggttcagcggcagtggatctgggacagaattcactctcaccatcagcagcctgcagcctgatgattttgcaacttattactgccaacagtatagtagttattcgtacacttttggccaggggaccaagctggagatcaaacgtacggtagctgccccttcagtttttatctttccgccgtctgacgagcagttaaaatccgggaccgcttctgtagtttgcctgctgaataatttttatccgcgtgaggctaaagtacaatggaaagtcgacaatgctttgcagtcgggaaattcacaggaaagtgttacggagcaggattctaaagattccacatattcactcagctccacccttacactgagcaaagccgactatgaaaaacataaagtttacgcatgtgaggtgacgcaccaaggattatccagtccggtcacaaaatcgtttaaccgcggtgagtgt

SEQ ID NO: 480 - DNA, 642 bp, Synthetic construct
  source 1..642: mol_type = other DNA
gacatccagatgacccagtctccatcttccgtgtctgcatctgtaggagacagagtcaccatcacttgtcggacgagtcagggtattagaaactggttagcctggtatcagcagaaaccagggaaagcccctaaactcctgatctatgctgcatccagtttgcaaactgggggcccatcaaggttcagcggcagtggatctgggacagatttcactctcaccatcagcagcctgcagcctgaagattttgcaacttactattgtcaacaggctaacagtttcccgtacacttttggccaggggaccaagctggagatcaaacgtacggtagctgccccttcagtttttatctttccgccgtctgacgagcagttaaaatccgggaccgcttctgtagtttgcctgctgaataatttttatccgcgtgaggctaaagtacaatggaaagtcgacaatgctttgcagtcgggaaattcacaggaaagtgttacggagcaggattctaaagattccacatattcactcagctccacccttacactgagcaaagccgactatgaaaaacataaagtttacgcatgtgaggtgacgcaccaaggattatccagtccggtcacaaaatcgtttaaccgcggtgagtgt

SEQ ID NO: 481 - DNA, 639 bp, Synthetic construct
  source 1..639: mol_type = other DNA
gaaattgtgttgacgcagtctccagccaccctgtctgtgtctccaggggaaagagccaccctctcctgcagggccagtcagagtgttagcagcaacttagcctggtaccagcagaaacctggccaggctcccaggctcctcatctatggtgcatccagcagggccactggcatcccagacaggttcagtggcagtgggtctgggacagacttcactctcaccatcagcagactggagcctgaagattttgcagtgtattactgtcagcagtatggtagctcattcactttcggccctgggaccaaagtggatatcaaacgtacggtagctgccccttcagtttttatctttccgccgtctgacgagcagttaaaatccgggaccgcttctgtagtttgcctgctgaataatttttatccgcgtgaggctaaagtacaatggaaagtcgacaatgctttgcagtcgggaaattcacaggaaagtgttacggagcaggattctaaagattccacatattcactcagctccacccttacactgagcaaagccgactatgaaaaacataaagtttacgcatgtgaggtgacgcaccaaggattatccagtccggtcacaaaatcgtttaaccgcggtgagtgt

SEQ ID NO: 482 - DNA, 663 bp, Synthetic construct
  source 1..663: mol_type = other DNA
gacatcgtgatgactcagtctccagactccctggctgtgtctctgggcgagagggccaccatcaactgcaagtccagccagagtgttttatacagctccaacaataagaactacttagcttggtaccagcagaaaccaggacagcctcctaagctgctcatttactgggcatctacccgggaatccggggtccctgaccgattcagtggcagcgggtctgggacagatttcactctcaccatcagcagcctgcaggctgaagatgtggcagtttattactgtcagcagtatggtagctcacccatgtacacttttggccaggggaccaagctggagatcaaacgtacggtagctgccccttcagtttttatctttccgccgtctgacgagcagttaaaatccgggaccgcttctgtagtttgcctgctgaataatttttatccgcgtgaggctaaagtacaatggaaagtcgacaatgctttgcagtcgggaaattcacaggaaagtgttacggagcaggattctaaagattccacatattcactcagctccacccttacactgagcaaagccgactatgaaaaacataaagtttacgcatgtgaggtgacgcaccaaggattatccagtccggtcacaaaatcgtttaaccgcggtgagtgt

SEQ ID NO: 483 - DNA, 642 bp, Synthetic construct
  source 1..642: mol_type = other DNA
gaaattgtgttgacgcagtctccaggcaccctgtctttgtctccaggggaaagagccaccctctcctgcagggccagtcagaatgttaggggcagctacttagcctggtaccagcagaaacctggccaggctcccaggctcctcatatatggtgcatccaacagggccactgacatcccagacaggttcagtggcagtgggtctgggacagacttcactctcaccatcagcggcctggagcctgaagattttgtagtgtattactgtcagcagtatggtagttcgtacacttttggccaggggaccaaggtggagatcaaacgtacggtagctgccccttcagtttttatctttccgccgtctgacgagcagttaaaatccgggaccgcttctgtagtttgcctgctgaataatttttatccgcgtgaggctaaagtacaatggaaagtcgacaatgctttgcagtcgggaaattcacaggaaagtgttacggagcaggattctaaagattccacatattcactcagctccacccttacactgagcaaagccgactatgaaaaacataaagtttacgcatgtgaggtgacgcaccaaggattatccagtccggtcacaaaatcgtttaaccgcggtgagtgt

SEQ ID NO: 484 - protein, 453 aa, Synthetic construct
QVQLQESGPGLVKPSGTLSLTCAVSGGSISSRNWWSWVRQPPGKGLEWIGEIYHGGTTNYNPSLKSRVTISVDKSKNQFSLKLSSVTAADTAVYYCARGGLRLGELSPNAFDIWGQGTMVTVSSASTKGPSVFPLAPSSKSTSGGTAALGCLVKDYFPEPVTVSWNSGALTSGVHTFPAVLQSSGLYSLSSVVTVPSSSLGTQTYICNVNHKPSNTKVDKRVEPKSCDKTHTCPPCPAPELLGGPSVFLFPPKPKDTLMISRTPEVTCVVVDVSHEDPEVKFNWYVDGVEVHNAKTKPREEQYASTYRVVSVLTVLHQDWLNGKEYKCKVSNKALPAPIEKTISKAKGQPREPQVYTLPPSREEMTKNQVSLTCLVKGFYPSDIAVEWESNGQPENNYKTTPPVLDSDGSFFLYSKLTVDKSRWQQGNVFSCSVMHEALHNHYTQKSLSLSPG

SEQ ID NO: 485 - protein, 443 aa, Synthetic construct
QVQLQESGPGLVKPSGTLSLTCAVSGGSISSSNWWTWVRQPPGKGLEWIGETYHDGSTNYNPSLKSRVTISVDKSKNQFSLKLSSVTAADTAVYYCLEFYFDYWGQGTLVTVSSASTKGPSVFPLAPSSKSTSGGTAALGCLVKDYFPEPVTVSWNSGALTSGVHTFPAVLQSSGLYSLSSVVTVPSSSLGTQTYICNVNHKPSNTKVDKRVEPKSCDKTHTCPPCPAPELLGGPSVFLFPPKPKDTLMISRTPEVTCVVVDVSHEDPEVKFNWYVDGVEVHNAKTKPREEQYASTYRVVSVLTVLHQDWLNGKEYKCKVSNKALPAPIEKTISKAKGQPREPQVYTLPPSREEMTKNQVSLTCLVKGFYPSDIAVEWESNGQPENNYKTTPPVLDSDGSFFLYSKLTVDKSRWQQGNVFSCSVMHEALHNHYTQKSLSLSPG

SEQ ID NO: 486 - protein, 443 aa, Synthetic construct
QVQLQESGPGLVKPSGTLSLTCAVSGASISTSNWWTWVRQPPGKGLEWIGEIYHDGSTNYSPSLQSRVTISVDKSKNQFSLTLTSVTAADTAIYYCGDFYIDVWGNGTTVTVSSASTKGPSVFPLAPSSKSTSGGTAALGCLVKDYFPEPVTVSWNSGALTSGVHTFPAVLQSSGLYSLSSVVTVPSSSLGTQTYICNVNHKPSNTKVDKRVEPKSCDKTHTCPPCPAPELLGGPSVFLFPPKPKDTLMISRTPEVTCVVVDVSHEDPEVKFNWYVDGVEVHNAKTKPREEQYASTYRVVSVLTVLHQDWLNGKEYKCKVSNKALPAPIEKTISKAKGQPREPQVYTLPPSREEMTKNQVSLTCLVKGFYPSDIAVEWESNGQPENNYKTTPPVLDSDGSFFLYSKLTVDKSRWQQGNVFSCSVMHEALHNHYTQKSLSLSPG

SEQ ID NO: 487 - protein, 443 aa, Synthetic construct
QVQLQESGPGLVKPSGTLSLTCAVSGGSISTSDWWTWVRQPPGKGLEWIGEIYHSGSTNYNPSLKSRVTISVDKSKNQFSLKLSSVTAADTAVYYCADWYFDLWGRGTLVTVSSASTKGPSVFPLAPSSKSTSGGTAALGCLVKDYFPEPVTVSWNSGALTSGVHTFPAVLQSSGLYSLSSVVTVPSSSLGTQTYICNVNHKPSNTKVDKRVEPKSCDKTHTCPPCPAPELLGGPSVFLFPPKPKDTLMISRTPEVTCVVVDVSHEDPEVKFNWYVDGVEVHNAKTKPREEQYASTYRVVSVLTVLHQDWLNGKEYKCKVSNKALPAPIEKTISKAKGQPREPQVYTLPPSREEMTKNQVSLTCLVKGFYPSDIAVEWESNGQPENNYKTTPPVLDSDGSFFLYSKLTVDKSRWQQGNVFSCSVMHEALHNHYTQKSLSLSPG

SEQ ID NO: 488 - protein, 452 aa, Synthetic construct
QVQLQESGPGLVKPSGTLSLTCAVSGGSISISKWWSWVRQPPGKGLEWIGEIYHTGSTNYHPSLKSRVTISVDKSKNQFYLKLNSVTAADTAVYYCARDELRLGELSPSLDIWGQGTMVTVSSASTKGPSVFPLAPSSKSTSGGTAALGCLVKDYFPEPVTVSWNSGALTSGVHTFPAVLQSSGLYSLSSVVTVPSSSLGTQTYICNVNHKPSNTKVDKRVEPKSCDKTHTCPPCPAPELLGGPSVFLFPPKPKDTLMISRTPEVTCVVVDVSHEDPEVKFNWYVDGVEVHNAKTKPREEQYASTYRVVSVLTVLHQDWLNGKEYKCKVSNKALPAPIEKTISKAKGQPREPQVYTLPPSREEMTKNQVSLTCLVKGFYPSDIAVEWESNGQPENNYKTTPPVLDSDGSFFLYSKLTVDKSRWQQGNVFSCSVMHEALHNHYTQKSLSLSPG

SEQ ID NO: 489 - protein, 453 aa, Synthetic construct
QVQLQESGPGLVKPSGTLSLTCAVSGGSISSSNWWSWVRQSPGKGLEWIGEIYHSGTTNYNPSLKSRVTISVDKSKNQFSLKLSSATAADTAVYYCARDRLRLGESSSDVFDIWGQGTMVTVSSASTKGPSVFPLAPSSKSTSGGTAALGCLVKDYFPEPVTVSWNSGALTSGVHTFPAVLQSSGLYSLSSVVTVPSSSLGTQTYICNVNHKPSNTKVDKRVEPKSCDKTHTCPPCPAPELLGGPSVFLFPPKPKDTLMISRTPEVTCVVVDVSHEDPEVKFNWYVDGVEVHNAKTKPREEQYASTYRVVSVLTVLHQDWLNGKEYKCKVSNKALPAPIEKTISKAKGQPREPQVYTLPPSREEMTKNQVSLTCLVKGFYPSDIAVEWESNGQPENNYKTTPPVLDSDGSFFLYSKLTVDKSRWQQGNVFSCSVMHEALHNHYTQKSLSLSPG

SEQ ID NO: 490 - protein, 451 aa, Synthetic construct
QVQLQESGPGLVKPSGTLSLTCAVSGGSISGSHWWSWFRQPPGKGLEWIGEIYHTGSTNKNPSLKSRVTISLDKSKNQFSLRLRSVTDADTAVYYCARDQYTGSPRDAFDIWGQGTMVTVSSASTKGPSVFPLAPSSKSTSGGTAALGCLVKDYFPEPVTVSWNSGALTSGVHTFPAVLQSSGLYSLSSVVTVPSSSLGTQTYICNVNHKPSNTKVDKRVEPKSCDKTHTCPPCPAPELLGGPSVFLFPPKPKDTLMISRTPEVTCVVVDVSHEDPEVKFNWYVDGVEVHNAKTKPREEQYASTYRVVSVLTVLHQDWLNGKEYKCKVSNKALPAPIEKTISKAKGQPREPQVYTLPPSREEMTKNQVSLTCLVKGFYPSDIAVEWESNGQPENNYKTTPPVLDSDGSFFLYSKLTVDKSRWQQGNVFSCSVMHEALHNHYTQKSLSLSPG

SEQ ID NO: 491 - protein, 450 aa, Synthetic construct
QVQLQESGPGLVKPSGTLSLTCAVSGGSISSSNWWSWVRQSPGKGLEWIGEIYHTGSTNKKPSLKSRVIISVDKSKNQFSLKLISVNAADTAIYYCARDREGGTTEAFDIWGQGTMVTVSSASTKGPSVFPLAPSSKSTSGGTAALGCLVKDYFPEPVTVSWNSGALTSGVHTFPAVLQSSGLYSLSSVVTVPSSSLGTQTYICNVNHKPSNTKVDKRVEPKSCDKTHTCPPCPAPELLGGPSVFLFPPKPKDTLMISRTPEVTCVVVDVSHEDPEVKFNWYVDGVEVHNAKTKPREEQYASTYRVVSVLTVLHQDWLNGKEYKCKVSNKALPAPIEKTISKAKGQPREPQVYTLPPSREEMTKNQVSLTCLVKGFYPSDIAVEWESNGQPENNYKTTPPVLDSDGSFFLYSKLTVDKSRWQQGNVFSCSVMHEALHNHYTQKSLSLSPG

SEQ ID NO: 492 - protein, 451 aa, Synthetic construct
QVQLQESGPGLVKPSGTLSLTCAVSGGSISSSNWWSWVRQPPGKGLEWIGEIYHSGSTNYNPSLKSRVTISVDKSKNQFSLKLRSVTAADTAVYYCARDQLSSGPTDAFDIWGQGTMVTVSSASTKGPSVFPLAPSSKSTSGGTAALGCLVKDYFPEPVTVSWNSGALTSGVHTFPAVLQSSGLYSLSSVVTVPSSSLGTQTYICNVNHKPSNTKVDKRVEPKSCDKTHTCPPCPAPELLGGPSVFLFPPKPKDTLMISRTPEVTCVVVDVSHEDPEVKFNWYVDGVEVHNAKTKPREEQYASTYRVVSVLTVLHQDWLNGKEYKCKVSNKALPAPIEKTISKAKGQPREPQVYTLPPSREEMTKNQVSLTCLVKGFYPSDIAVEWESNGQPENNYKTTPPVLDSDGSFFLYSKLTVDKSRWQQGNVFSCSVMHEALHNHYTQKSLSLSPG

SEQ ID NO: 493 - protein, 449 aa, Synthetic construct
QVQLQESGPGLMKPSETLSLTCTVSGGSISSHYWSWIRQPPGKGLEWIGYIFYSGNINYNPSLKSRVTISVDTSKNQFSLKLRSVTTADTAVYYCARDRGGSYSYHFDCWGQGTLVTVSSASTKGPSVFPLAPSSKSTSGGTAALGCLVKDYFPEPVTVSWNSGALTSGVHTFPAVLQSSGLYSLSSVVTVPSSSLGTQTYICNVNHKPSNTKVDKRVEPKSCDKTHTCPPCPAPELLGGPSVFLFPPKPKDTLMISRTPEVTCVVVDVSHEDPEVKFNWYVDGVEVHNAKTKPREEQYASTYRVVSVLTVLHQDWLNGKEYKCKVSNKALPAPIEKTISKAKGQPREPQVYTLPPSREEMTKNQVSLTCLVKGFYPSDIAVEWESNGQPENNYKTTPPVLDSDGSFFLYSKLTVDKSRWQQGNVFSCSVMHEALHNHYTQKSLSLSPG

SEQ ID NO: 494 - protein, 448 aa, Synthetic construct
QVQLQESGPGLVKPSETMSLTCTVSGGSFTGYYWSWIRQPPGKGLEWIGYVHYSGGTKSNPSLKSRVTISVDTSKNQFSLKLSSVTAADTAVYYCARERYEWNSYFDYWGQGTLVTVSSASTKGPSVFPLAPSSKSTSGGTAALGCLVKDYFPEPVTVSWNSGALTSGVHTFPAVLQSSGLYSLSSVVTVPSSSLGTQTYICNVNHKPSNTKVDKRVEPKSCDKTHTCPPCPAPELLGGPSVFLFPPKPKDTLMISRTPEVTCVVVDVSHEDPEVKFNWYVDGVEVHNAKTKPREEQYASTYRVVSVLTVLHQDWLNGKEYKCKVSNKALPAPIEKTISKAKGQPREPQVYTLPPSREEMTKNQVSLTCLVKGFYPSDIAVEWESNGQPENNYKTTPPVLDSDGSFFLYSKLTVDKSRWQQGNVFSCSVMHEALHNHYTQKSLSLSPG

SEQ ID NO: 495 - DNA, 1359 bp, Synthetic construct
  source 1..1359: mol_type = other DNA
caggtgcagctgcaggagtcgggcccaggactggtgaagccttcggggaccctgtccctcacctgtgctgtctcgggtggctccatcagtagtcgtaactggtggagttgggtccgccagcccccagggaaggggctggagtggattggggaaatctatcatggtgggaccaccaactacaacccgtcccttaagagtcgagtcaccatatcagtagacaagtccaagaaccaattctccctgaagctgagttctgtgaccgccgcggacacggccgtgtattactgtgcgagagggggattacgtttgggggagttatcgcctaatgcttttgatatctggggacaagggacaatggtcaccgtctcttcagctagcactaaagggccttctgtatttcccttggccccgtccagcaaatcgacctcgggagggacagccgccctgggttgccttgtgaaagattatttccctgagccagttaccgtaagttggaacagtggggcgctgacaagtggtgtgcacacgtttcctgccgtcctgcaatcatcgggcttgtatagcctcagctctgtggtcactgtcccaagttcatcgctgggcactcagacgtatatttgcaatgtgaaccacaaaccttcaaatacaaaagtggataaacgcgtagaaccgaaatcgtgtgataaaactcacacatgcccgccatgcccggcacctgaactgcttggtggtcccagcgtgttcctgttcccgccgaagcctaaagatactctaatgatcagccgtacgccagaggtgacatgtgtcgtggttgacgtgtcccacgaagatcccgaagttaagttcaattggtatgttgatggtgtagaggtacacaatgctaagactaaacctcgcgaggagcagtacgcctcgacctatcgtgtcgtgagcgttctgaccgtccttcaccaagattggcttaacggcaaagaatataagtgcaaggtaagcaataaagcacttccggccccaatcgagaaaaccatttccaaggccaaaggtcaaccaagagaaccccaggtgtatactcttccgccttctcgtgaggaaatgactaaaaatcaagtatcccttacgtgtctggttaaaggtttttatcctagcgatattgctgttgaatgggaatcgaacggtcagccggagaataattataaaacaacgccacccgtcctggatagcgacggctcattttttctgtatagcaaactgactgtagataaatcacggtggcagcagggcaatgtattcagttgctccgttatgcatgaagcgttacataatcactacacgcagaaatctcttagtctttcacccggt

SEQ ID NO: 496 - DNA, 1329 bp, Synthetic construct
  source 1..1329: mol_type = other DNA
caggtgcagctgcaggagtcgggcccaggactggtgaagccttcggggaccctgtccctcacctgcgctgtctctggtggctccatcagcagtagtaactggtggacttgggtccgccagcccccagggaaggggctggagtggattggggaaacctatcatgatgggagcaccaactacaacccgtccctcaagagtcgagtcaccatttcagtagacaagtccaagaaccaattctccctgaaactgagttctgtgaccgccgcggacacggccgtgtattactgtttggaattctactttgactactggggccagggaaccctggtcaccgtctcctcagctagcactaaagggccttctgtatttcccttggccccgtccagcaaatcgacctcgggagggacagccgccctgggttgccttgtgaaagattatttccctgagccagttaccgtaagttggaacagtggggcgctgacaagtggtgtgcacacgtttcctgccgtcctgcaatcatcgggcttgtatagcctcagctctgtggtcactgtcccaagttcatcgctgggcactcagacgtatatttgcaatgtgaaccacaaaccttcaaatacaaaagtggataaacgcgtagaaccgaaatcgtgtgataaaactcacacatgcccgccatgcccggcacctgaactgcttggtggtcccagcgtgttcctgttcccgccgaagcctaaagatactctaatgatcagccgtacgccagaggtgacatgtgtcgtggttgacgtgtcccacgaagatcccgaagttaagttcaattggtatgttgatggtgtagaggtacacaatgctaagactaaacctcgcgaggagcagtacgcctcgacctatcgtgtcgtgagcgttctgaccgtccttcaccaagattggcttaacggcaaagaatataagtgcaaggtaagcaataaagcacttccggccccaatcgagaaaaccatttccaaggccaaaggtcaaccaagagaaccccaggtgtatactcttccgccttctcgtgaggaaatgactaaaaatcaagtatcccttacgtgtctggttaaaggtttttatcctagcgatattgctgttgaatgggaatcgaacggtcagccggagaataattataaaacaacgccacccgtcctggatagcgacggctcattttttctgtatagcaaactgactgtagataaatcacggtggcagcagggcaatgtattcagttgctccgttatgcatgaagcgttacataatcactacacgcagaaatctcttagtctttcacccggt

SEQ ID NO: 497 - DNA, 1329 bp, Synthetic construct
  source 1..1329: mol_type = other DNA
caggtgcagctgcaggagtcgggcccaggactggtgaagccttcggggaccctgtccctcacctgcgctgtgtctggtgcctccatcagcacaagtaattggtggacttgggtccgccagcccccagggaaggggctggagtggattggtgaaatctatcatgatgggagcaccaactacagcccgtccctccagagtcgagtcaccatatcagtagacaagtccaagaaccagttctccctgacgctgacctctgtgaccgccgcggacacggccatttattattgtggtgacttctacatagacgtctggggcaacgggaccacggtcaccgtctcctcagctagcactaaagggccttctgtatttcccttggccccgtccagcaaatcgacctcgggagggacagccgccctgggttgccttgtgaaagattatttccctgagccagttaccgtaagttggaacagtggggcgctgacaagtggtgtgcacacgtttcctgccgtcctgcaatcatcgggcttgtatagcctcagctctgtggtcactgtcccaagttcatcgctgggcactcagacgtatatttgcaatgtgaaccacaaaccttcaaatacaaaagtggataaacgcgtagaaccgaaatcgtgtgataaaactcacacatgcccgccatgcccggcacctgaactgcttggtggtcccagcgtgttcctgttcccgccgaagcctaaagatactctaatgatcagccgtacgccagaggtgacatgtgtcgtggttgacgtgtcccacgaagatcccgaagttaagttcaattggtatgttgatggtgtagaggtacacaatgctaagactaaacctcgcgaggagcagtacgcctcgacctatcgtgtcgtgagcgttctgaccgtccttcaccaagattggcttaacggcaaagaatataagtgcaaggtaagcaataaagcacttccggccccaatcgagaaaaccatttccaaggccaaaggtcaaccaagagaaccccaggtgtatactcttccgccttctcgtgaggaaatgactaaaaatcaagtatcccttacgtgtctggttaaaggtttttatcctagcgatattgctgttgaatgggaatcgaacggtcagccggagaataattataaaacaacgccacccgtcctggatagcgacggctcattttttctgtatagcaaactgactgtagataaatcacggtggcagcagggcaatgtattcagttgctccgttatgcatgaagcgttacataatcactacacgcagaaatctcttagtctttcacccggt

SEQ ID NO: 498 - DNA, 1329 bp, Synthetic construct
  source 1..1329: mol_type = other DNA
caggtgcagctgcaggagtcgggcccaggactggtgaagccttcggggaccctgtccctcacctgcgctgtctctggtggctccatcagcactagtgactggtggacttgggtccgccagcccccagggaaggggctggagtggattggggaaatctatcatagtgggagcaccaactacaacccgtccctcaagagtcgagtcaccatatcagtagacaaatccaagaaccagttctccctgaagctgagctctgtgaccgccgcggacacggccgtgtattactgtgcggactggtacttcgatctctggggccgtggcaccctggtcactgtctcctcagctagcactaaagggccttctgtatttcccttggccccgtccagcaaatcgacctcgggagggacagccgccctgggttgccttgtgaaagattatttccctgagccagttaccgtaagttggaacagtggggcgctgacaagtggtgtgcacacgtttcctgccgtcctgcaatcatcgggcttgtatagcctcagctctgtggtcactgtcccaagttcatcgctgggcactcagacgtatatttgcaatgtgaaccacaaaccttcaaatacaaaagtggataaacgcgtagaaccgaaatcgtgtgataaaactcacacatgcccgccatgcccggcacctgaactgcttggtggtcccagcgtgttcctgttcccgccgaagcctaaagatactctaatgatcagccgtacgccagaggtgacatgtgtcgtggttgacgtgtcccacgaagatcccgaagttaagttcaattggtatgttgatggtgtagaggtacacaatgctaagactaaacctcgcgaggagcagtacgcctcgacctatcgtgtcgtgagcgttctgaccgtccttcaccaagattggcttaacggcaaagaatataagtgcaaggtaagcaataaagcacttccggccccaatcgagaaaaccatttccaaggccaaaggtcaaccaagagaaccccaggtgtatactcttccgccttctcgtgaggaaatgactaaaaatcaagtatcccttacgtgtctggttaaaggtttttatcctagcgatattgctgttgaatgggaatcgaacggtcagccggagaataattataaaacaacgccacccgtcctggatagcgacggctcattttttctgtatagcaaactgactgtagataaatcacggtggcagcagggcaatgtattcagttgctccgttatgcatgaagcgttacataatcactacacgcagaaatctcttagtctttcacccggt

SEQ ID NO: 499 - DNA, 1356 bp, Synthetic construct
  source 1..1356: mol_type = other DNA
caggtgcagctgcaggagtcgggcccaggactggtgaagccttcggggaccctgtccctcacctgcgctgtgtctggtggctccatcagcattagtaaatggtggagttgggtccgccagcccccagggaagggactggagtggattggggaaatctatcatactgggagcaccaactaccacccgtccctcaagagccgagtcaccatatcagtagacaagtccaagaaccaattctacctgaagctgaactctgtgaccgccgcggacacggccgtatattactgtgcgagagatgaattacggttgggggagttatcgccctctcttgatatctggggacaagggacaatggtcaccgtctcttcagctagcactaaagggccttctgtatttcccttggccccgtccagcaaatcgacctcgggagggacagccgccctgggttgccttgtgaaagattatttccctgagccagttaccgtaagttggaacagtggggcgctgacaagtggtgtgcacacgtttcctgccgtcctgcaatcatcgggcttgtatagcctcagctctgtggtcactgtcccaagttcatcgctgggcactcagacgtatatttgcaatgtgaaccacaaaccttcaaatacaaaagtggataaacgcgtagaaccgaaatcgtgtgataaaactcacacatgcccgccatgcccggcacctgaactgcttggtggtcccagcgtgttcctgttcccgccgaagcctaaagatactctaatgatcagccgtacgccagaggtgacatgtgtcgtggttgacgtgtcccacgaagatcccgaagttaagttcaattggtatgttgatggtgtagaggtacacaatgctaagactaaacctcgcgaggagcagtacgcctcgacctatcgtgtcgtgagcgttctgaccgtccttcaccaagattggcttaacggcaaagaatataagtgcaaggtaagcaataaagcacttccggccccaatcgagaaaaccatttccaaggccaaaggtcaaccaagagaaccccaggtgtatactcttccgccttctcgtgaggaaatgactaaaaatcaagtatcccttacgtgtctggttaaaggtttttatcctagcgatattgctgttgaatgggaatcgaacggtcagccggagaataattataaaacaacgccacccgtcctggatagcgacggctcattttttctgtatagcaaactgactgtagataaatcacggtggcagcagggcaatgtattcagttgctccgttatgcatgaagcgttacataatcactacacgcagaaatctcttagtctttcacccggt

SEQ ID NO: 500 - DNA, 1359 bp, Synthetic construct
  source 1..1359: mol_type = other DNA
caggtgcagctgcaggagtcgggcccaggactggtgaagccttcggggaccctgtccctcacctgcgctgtctctggtggctccatcagcagtagtaactggtggagttgggtccgccagtccccagggaaggggctggaatggattggggaaatctatcatagtgggaccaccaactacaacccgtccctcaagagtcgagtcaccatatcagtagacaagtccaagaaccagttctccctgaagctgagctctgcgaccgccgcggacacggccgtgtattattgtgcgagagatagattacgtttgggggagtcatcgtccgatgtttttgatatctggggacaagggacaatggtcaccgtctcttcagctagcactaaagggccttctgtatttcccttggccccgtccagcaaatcgacctcgggagggacagccgccctgggttgccttgtgaaagattatttccctgagccagttaccgtaagttggaacagtggggcgctgacaagtggtgtgcacacgtttcctgccgtcctgcaatcatcgggcttgtatagcctcagctctgtggtcactgtcccaagttcatcgctgggcactcagacgtatatttgcaatgtgaaccacaaaccttcaaatacaaaagtggataaacgcgtagaaccgaaatcgtgtgataaaactcacacatgcccgccatgcccggcacctgaactgcttggtggtcccagcgtgttcctgttcccgccgaagcctaaagatactctaatgatcagccgtacgccagaggtgacatgtgtcgtggttgacgtgtcccacgaagatcccgaagttaagttcaattggtatgttgatggtgtagaggtacacaatgctaagactaaacctcgcgaggagcagtacgcctcgacctatcgtgtcgtgagcgttctgaccgtccttcaccaagattggcttaacggcaaagaatataagtgcaaggtaagcaataaagcacttccggccccaatcgagaaaaccatttccaaggccaaaggtcaaccaagagaaccccaggtgtatactcttccgccttctcgtgaggaaatgactaaaaatcaagtatcccttacgtgtctggttaaaggtttttatcctagcgatattgctgttgaatgggaatcgaacggtcagccggagaataattataaaacaacgccacccgtcctggatagcgacggctcattttttctgtatagcaaactgactgtagataaatcacggtggcagcagggcaatgtattcagttgctccgttatgcatgaagcgttacataatcactacacgcagaaatctcttagtctttcacccggt

SEQ ID NO: 501 - DNA, 1353 bp, Synthetic construct
  source 1..1353: mol_type = other DNA
caggtgcagctgcaggagtcgggcccaggactggtgaagccttcggggaccctgtccctcacctgcgctgtctctggtggctccatcagcggtagtcactggtggagttggttccgccagcccccaggaaaggggctggagtggattggggaaatctatcatactgggagcaccaacaaaaacccgtccctcaagagtcgagtcactatctcattagacaagtccaagaatcagttctccctgaggctgaggtctgtgaccgacgcggacacggccgtgtattactgtgcgagagatcagtatactgggagcccaagggatgcttttgatatctggggacaagggacaatggtcaccgtctcctcagctagcactaaagggccttctgtatttcccttggccccgtccagcaaatcgacctcgggagggacagccgccctgggttgccttgtgaaagattatttccctgagccagttaccgtaagttggaacagtggggcgctgacaagtggtgtgcacacgtttcctgccgtcctgcaatcatcgggcttgtatagcctcagctctgtggtcactgtcccaagttcatcgctgggcactcagacgtatatttgcaatgtgaaccacaaaccttcaaatacaaaagtggataaacgcgtagaaccgaaatcgtgtgataaaactcacacatgcccgccatgcccggcacctgaactgcttggtggtcccagcgtgttcctgttcccgccgaagcctaaagatactctaatgatcagccgtacgccagaggtgacatgtgtcgtggttgacgtgtcccacgaagatcccgaagttaagttcaattggtatgttgatggtgtagaggtacacaatgctaagactaaacctcgcgaggagcagtacgcctcgacctatcgtgtcgtgagcgttctgaccgtccttcaccaagattggcttaacggcaaagaatataagtgcaaggtaagcaataaagcacttccggccccaatcgagaaaaccatttccaaggccaaaggtcaaccaagagaaccccaggtgtatactcttccgccttctcgtgaggaaatgactaaaaatcaagtatcccttacgtgtctggttaaaggtttttatcctagcgatattgctgttgaatgggaatcgaacggtcagccggagaataattataaaacaacgccacccgtcctggatagcgacggctcattttttctgtatagcaaactgactgtagataaatcacggtggcagcagggcaatgtattcagttgctccgttatgcatgaagcgttacataatcactacacgcagaaatctcttagtctttcacccggt

SEQ ID NO: 502 - DNA, 1350 bp, Synthetic construct
  source 1..1350: mol_type = other DNA
caggtgcagctgcaggagtcgggcccaggactggtgaagccttcggggaccctgtccctcacctgcgctgtctctggtggctccatcagcagtagtaactggtggagttgggtccgccagtccccagggaaggggctggagtggattggggaaatctatcatactgggagcaccaacaaaaaaccgtccctcaagagtcgagtcatcatatcagtagacaagtccaagaaccagttctccctgaaactgatctctgtgaacgccgcggacacggccatatattactgtgcgagagatcgggaagggggaactactgaagcttttgatatctggggacaagggacaatggtcaccgtctcttcagctagcactaaagggccttctgtatttcccttggccccgtccagcaaatcgacctcgggagggacagccgccctgggttgccttgtgaaagattatttccctgagccagttaccgtaagttggaacagtggggcgctgacaagtggtgtgcacacgtttcctgccgtcctgcaatcatcgggcttgtatagcctcagctctgtggtcactgtcccaagttcatcgctgggcactcagacgtatatttgcaatgtgaaccacaaaccttcaaatacaaaagtggataaacgcgtagaaccgaaatcgtgtgataaaactcacacatgcccgccatgcccggcacctgaactgcttggtggtcccagcgtgttcctgttcccgccgaagcctaaagatactctaatgatcagccgtacgccagaggtgacatgtgtcgtggttgacgtgtcccacgaagatcccgaagttaagttcaattggtatgttgatggtgtagaggtacacaatgctaagactaaacctcgcgaggagcagtacgcctcgacctatcgtgtcgtgagcgttctgaccgtccttcaccaagattggcttaacggcaaagaatataagtgcaaggtaagcaataaagcacttccggccccaatcgagaaaaccatttccaaggccaaaggtcaaccaagagaaccccaggtgtatactcttccgccttctcgtgaggaaatgactaaaaatcaagtatcccttacgtgtctggttaaaggtttttatcctagcgatattgctgttgaatgggaatcgaacggtcagccggagaataattataaaacaacgccacccgtcctggatagcgacggctcattttttctgtatagcaaactgactgtagataaatcacggtggcagcagggcaatgtattcagttgctccgttatgcatgaagcgttacataatcactacacgcagaaatctcttagtctttcacccggt

SEQ ID NO: 503 - DNA, 1353 bp, Synthetic construct
  source 1..1353: mol_type = other DNA
caggtgcagctgcaggagtcgggcccaggactggtgaagccttcggggaccctgtccctcacctgcgctgtctctggtggctccatcagcagtagtaactggtggagttgggtccgccagcccccagggaaggggctggagtggattggggaaatctatcatagtgggagcaccaactacaacccgtccctcaagagtcgagtcaccatatcagtagacaagtccaagaaccagttctccctgaagctgaggtctgtgaccgccgcggacacggccgtttattactgtgcgagagatcaactaagtagcggacctacggatgcttttgatatctggggacaagggacaatggtcaccgtctcttcagctagcactaaagggccttctgtatttcccttggccccgtccagcaaatcgacctcgggagggacagccgccctgggttgccttgtgaaagattatttccctgagccagttaccgtaagttggaacagtggggcgctgacaagtggtgtgcacacgtttcctgccgtcctgcaatcatcgggcttgtatagcctcagctctgtggtcactgtcccaagttcatcgctgggcactcagacgtatatttgcaatgtgaaccacaaaccttcaaatacaaaagtggataaacgcgtagaaccgaaatcgtgtgataaaactcacacatgcccgccatgcccggcacctgaactgcttggtggtcccagcgtgttcctgttcccgccgaagcctaaagatactctaatgatcagccgtacgccagaggtgacatgtgtcgtggttgacgtgtcccacgaagatcccgaagttaagttcaattggtatgttgatggtgtagaggtacacaatgctaagactaaacctcgcgaggagcagtacgcctcgacctatcgtgtcgtgagcgttctgaccgtccttcaccaagattggcttaacggcaaagaatataagtgcaaggtaagcaataaagcacttccggccccaatcgagaaaaccatttccaaggccaaaggtcaaccaagagaaccccaggtgtatactcttccgccttctcgtgaggaaatgactaaaaatcaagtatcccttacgtgtctggttaaaggtttttatcctagcgatattgctgttgaatgggaatcgaacggtcagccggagaataattataaaacaacgccacccgtcctggatagcgacggctcattttttctgtatagcaaactgactgtagataaatcacggtggcagcagggcaatgtattcagttgctccgttatgcatgaagcgttacataatcactacacgcagaaatctcttagtctttcacccggt

SEQ ID NO: 504 - DNA, 1347 bp, Synthetic construct
  source 1..1347: mol_type = other DNA
caggtgcagctgcaggagtcgggcccaggactgatgaagccttcggagaccctgtccctcacctgcactgtctctggtggctccatcagtagtcactactggagctggatccggcaacccccagggaagggactggagtggattggatatatcttttacagtgggaacataaattacaacccctccctcaagagtcgagtcaccatatcagtagacacgtccaagaaccagttctccctgaagctgaggtctgtgaccactgcggacacggccgtatattactgtgcgagagatcgaggtgggagctattcgtaccactttgactgctggggccagggaaccctggtcaccgtctcctcagctagcactaaagggccttctgtatttcccttggccccgtccagcaaatcgacctcgggagggacagccgccctgggttgccttgtgaaagattatttccctgagccagttaccgtaagttggaacagtggggcgctgacaagtggtgtgcacacgtttcctgccgtcctgcaatcatcgggcttgtatagcctcagctctgtggtcactgtcccaagttcatcgctgggcactcagacgtatatttgcaatgtgaaccacaaaccttcaaatacaaaagtggataaacgcgtagaaccgaaatcgtgtgataaaactcacacatgcccgccatgcccggcacctgaactgcttggtggtcccagcgtgttcctgttcccgccgaagcctaaagatactctaatgatcagccgtacgccagaggtgacatgtgtcgtggttgacgtgtcccacgaagatcccgaagttaagttcaattggtatgttgatggtgtagaggtacacaatgctaagactaaacctcgcgaggagcagtacgcctcgacctatcgtgtcgtgagcgttctgaccgtccttcaccaagattggcttaacggcaaagaatataagtgcaaggtaagcaataaagcacttccggccccaatcgagaaaaccatttccaaggccaaaggtcaaccaagagaaccccaggtgtatactcttccgccttctcgtgaggaaatgactaaaaatcaagtatcccttacgtgtctggttaaaggtttttatcctagcgatattgctgttgaatgggaatcgaacggtcagccggagaataattataaaacaacgccacccgtcctggatagcgacggctcattttttctgtatagcaaactgactgtagataaatcacggtggcagcagggcaatgtattcagttgctccgttatgcatgaagcgttacataatcactacacgcagaaatctcttagtctttcacccggt

SEQ ID NO: 505 - DNA, 1344 bp, Synthetic construct
  source 1..1344: mol_type = other DNA
caggtgcagctgcaggagtcgggcccaggactggtgaagccttcggagactatgtccctcacctgcactgtctctggtggctccttcactggatactactggagttggatccggcagcccccagggaagggactggagtggattggatatgtccattacagtgggggcaccaaaagcaacccctccctcaagagtcgagtcaccatatcagtagacacgtccaagaaccagttttccctgaagctgagctctgtgaccgctgcggacacggccgtgtattactgtgcgagagagaggtatgagtggaactcctactttgactactggggccagggaaccctggtcaccgtctcctcagctagcactaaagggccttctgtatttcccttggccccgtccagcaaatcgacctcgggagggacagccgccctgggttgccttgtgaaagattatttccctgagccagttaccgtaagttggaacagtggggcgctgacaagtggtgtgcacacgtttcctgccgtcctgcaatcatcgggcttgtatagcctcagctctgtggtcactgtcccaagttcatcgctgggcactcagacgtatatttgcaatgtgaaccacaaaccttcaaatacaaaagtggataaacgcgtagaaccgaaatcgtgtgataaaactcacacatgcccgccatgcccggcacctgaactgcttggtggtcccagcgtgttcctgttcccgccgaagcctaaagatactctaatgatcagccgtacgccagaggtgacatgtgtcgtggttgacgtgtcccacgaagatcccgaagttaagttcaattggtatgttgatggtgtagaggtacacaatgctaagactaaacctcgcgaggagcagtacgcctcgacctatcgtgtcgtgagcgttctgaccgtccttcaccaagattggcttaacggcaaagaatataagtgcaaggtaagcaataaagcacttccggccccaatcgagaaaaccatttccaaggccaaaggtcaaccaagagaaccccaggtgtatactcttccgccttctcgtgaggaaatgactaaaaatcaagtatcccttacgtgtctggttaaaggtttttatcctagcgatattgctgttgaatgggaatcgaacggtcagccggagaataattataaaacaacgccacccgtcctggatagcgacggctcattttttctgtatagcaaactgactgtagataaatcacggtggcagcagggcaatgtattcagttgctccgttatgcatgaagcgttacataatcactacacgcagaaatctcttagtctttcacccggt

SEQ ID NO: 506 - protein, 214 aa, Synthetic construct
DIQMTQSPSSLSASVGDRVTITCRASQSISSYLNWYQQKPGKAPKVLIYAASSLQSGIPSRFSGSGSGTDFTLTISSLQPEDFATYYCQETYSVPLTFGGGTKVEIKRTVAAPSVFIFPPSDEQLKSGTASVVCLLNNFYPREAKVQWKVDNALQSGNSQESVTEQDSKDSTYSLSSTLTLSKADYEKHKVYACEVTHQGLSSPVTKSFNRGEC

SEQ ID NO: 507 - protein, 214 aa, Synthetic construct
DIQMTQSPSSLSASVGDRVTITCRASQDIRNDLGWYQQKPGKVPKRLIYAASSLQSGVPSRFSGSGSGTEFTLTISSLQPEDFASYYCLQYNNYPFTLGPGTKVDIKRTVAAPSVFIFPPSDEQLKSGTASVVCLLNNFYPREAKVQWKVDNALQSGNSQESVTEQDSKDSTYSLSSTLTLSKADYEKHKVYACEVTHQGLSSPVTKSFNRGEC

SEQ ID NO: 508 - protein, 214 aa, Synthetic construct
DIQMTQSPSSLSASVGDRVTITCRASQGIRKDLGWYQQKPGKAPKRLIYTASTLQSGVPSRFSGSGSGTEFTLTISSLQPEDFATYYCLQYNNYPFTFGPGTKVDIKRTVAAPSVFIFPPSDEQLKSGTASVVCLLNNFYPREAKVQWKVDNALQSGNSQESVTEQDSKDSTYSLSSTLTLSKADYEKHKVYACEVTHQGLSSPVTKSFNRGEC

SEQ ID NO: 509 - protein, 214 aa, Synthetic construct
DIQMTQSPSSLSASVGDRVTITCRASQGIRNDLGWYQQKPGKAPKRLIYAASSLQSGVPSRFSGSGSGTEFTLAISSLQPEDFATYYCLHFNSYPFTFGPGTKVDIKRTVAAPSVFIFPPSDEQLKSGTASVVCLLNNFYPREAKVQWKVDNALQSGNSQESVTEQDSKDSTYSLSSTLTLSKADYEKHKVYACEVTHQGLSSPVTKSFNRGEC

SEQ ID NO: 510 - protein, 214 aa, Synthetic construct
DIQMTQSPSSLSASVGDRVTITCRASQNINNYLNWFRQKPGKAPKLLIFAASSLQSGVPSRFSGSESGTDFTLTISSLQPEDFATYYCQQSYSTPLTFGGGTKVEIKRTVAAPSVFIFPPSDEQLKSGTASVVCLLNNFYPREAKVQWKVDNALQSGNSQESVTEQDSKDSTYSLSSTLTLSKADYEKHKVYACEVTHQGLSSPVTKSFNRGEC

SEQ ID NO: 511 - protein, 220 aa, Synthetic construct
DIVMTQSPDSLAVSLGERATINCKSSQSVLYSSNNKNYLAWYQQKPGQPPELLIYWASTRESGVPDRFSGSGSGTDFTLTISSLQAEDMAVYYCQQFYNTPYTFGQGTKVDIKRTVAAPSVFIFPPSDEQLKSGTASVVCLLNNFYPREAKVQWKVDNALQSGNSQESVTEQDSKDSTYSLSSTLTLSKADYEKHKVYACEVTHQGLSSPVTKSFNRGEC

SEQ ID NO: 512 - protein, 215 aa, Synthetic construct
EIVLTQSPGTLSLSPGERATLSCRASQSVSSSYLAWYQQKPGQAPRLLIYGASSRATGIPDRFSGSGSGTDFTLTISRLEPEDFAVYYCQHYGNSPLTFGGGTKVEIKRTVAAPSVFIFPPSDEQLKSGTASVVCLLNNFYPREAKVQWKVDNALQSGNSQESVTEQDSKDSTYSLSSTLTLSKADYEKHKVYACEVTHQGLSSPVTKSFNRGEC

SEQ ID NO: 513 - protein, 213 aa, Synthetic construct
EIVMTQSPATLSVSPGERATLSCRASQSVSSNLAWYQQKPGQAPRLLIYGASTRATGIPVRFSGSGSGTQFTLTISSLQSEDFAVYYCQQYDNWRTFGQGTRLEIKRTVAAPSVFIFPPSDEQLKSGTASVVCLLNNFYPREAKVQWKVDNALQSGNSQESVTEQDSKDSTYSLSSTLTLSKADYEKHKVYACEVTHQGLSSPVTKSFNRGEC

SEQ ID NO: 514 - protein, 213 aa, Synthetic construct
EIVMTQSPATLSVSPGERATLSCRASQSVSSNLAWYQQKPGQAPRLLIYGASTRATGIPVRFSGSGSGTQFTLTISSLQSEDFAVYYCQQYDNWRTFGQGTKLEIKRTVAAPSVFIFPPSDEQLKSGTASVVCLLNNFYPREAKVQWKVDNALQSGNSQESVTEQDSKDSTYSLSSTLTLSKADYEKHKVYACEVTHQGLSSPVTKSFNRGEC

SEQ ID NO: 515 - protein, 214 aa, Synthetic construct
DIQMTQSPSSVSASVGDRVTITCRASQSFAGWLAWYQQKPGKAPKLLIYAASTLQSGVPSRFSGSGSGTDFTLTISSLQPEDFATYYCQQANSFPLTFGGGTKVEIKRTVAAPSVFIFPPSDEQLKSGTASVVCLLNNFYPREAKVQWKVDNALQSGNSQESVTEQDSKDSTYSLSSTLTLSKADYEKHKVYACEVTHQGLSSPVTKSFNRGEC

SEQ ID NO: 516 - protein, 220 aa, Synthetic construct
DIVMTQSPDSLAVSLGERATINCKSSQSVLYSSNNKNYLAWYHQKPGQPPKLLIYWASTRESGVPDRFSGSGSGTDFTLTISSLQAEDVAVYYCQQYYSSPRTFGQGTKVEIKRTVAAPSVFIFPPSDEQLKSGTASVVCLLNNFYPREAKVQWKVDNALQSGNSQESVTEQDSKDSTYSLSSTLTLSKADYEKHKVYACEVTHQGLSSPVTKSFNRGEC

SEQ ID NO: 517 - DNA, 642 bp, Synthetic construct
  source 1..642: mol_type = other DNA
gacatccagatgacccagtctccatcctccctgtctgcatctgtgggagacagagtcaccatcacttgccgggcaagtcagagcattagcagctatttaaattggtatcagcagaaaccagggaaagcccctaaggtcctgatctatgctgcatccagtttgcagagtgggatcccatcacggttcagtggcagtggatctgggacagatttcactctcaccatcagcagtctgcaacctgaagattttgcaacttactactgtcaagagacttacagtgttccgctcactttcggcggagggaccaaggtggagatcaaacgtacggtagctgccccttcagtttttatctttccgccgtctgacgagcagttaaaatccgggaccgcttctgtagtttgcctgctgaataatttttatccgcgtgaggctaaagtacaatggaaagtcgacaatgctttgcagtcgggaaattcacaggaaagtgttacggagcaggattctaaagattccacatattcactcagctccacccttacactgagcaaagccgactatgaaaaacataaagtttacgcatgtgaggtgacgcaccaaggattatccagtccggtcacaaaatcgtttaaccgcggtgagtgt

SEQ ID NO: 518 - DNA, 642 bp, Synthetic construct
  source 1..642: mol_type = other DNA
gacatccagatgacccagtctccatcctccctgtctgcatctgtaggagacagagtcaccatcacttgccgggcaagtcaggacattagaaatgatttaggctggtatcagcagaaaccagggaaagtccctaagcgcctgatctatgctgcatctagtttgcaaagtggggtcccatcaaggttcagcggcagtggatctgggacagaattcactctcacaatcagcagcctgcagcctgaagatttcgcaagttattactgtctacagtataataattatccattcactctcggccctgggaccaaagtggatatcaaacgtacggtagctgccccttcagtttttatctttccgccgtctgacgagcagttaaaatccgggaccgcttctgtagtttgcctgctgaataatttttatccgcgtgaggctaaagtacaatggaaagtcgacaatgctttgcagtcgggaaattcacaggaaagtgttacggagcaggattctaaagattccacatattcactcagctccacccttacactgagcaaagccgactatgaaaaacataaagtttacgcatgtgaggtgacgcaccaaggattatccagtccggtcacaaaatcgtttaaccgcggtgagtgt

SEQ ID NO: 519 - DNA, 642 bp, Synthetic construct
  source 1..642: mol_type = other DNA
gacatccagatgacccagtctccatcctccctgtctgcatctgtaggagacagagtcaccatcacttgccgggcaagtcagggcattagaaaagatttaggctggtatcagcagaaaccagggaaagcccctaagcgcctgatctatactgcatccactttacaaagtggggtcccatcaaggttcagcggcagtggatctgggacagaattcactctcacaatcagcagcctgcagcctgaagattttgcaacttattactgtctacagtataataattacccattcactttcggccctgggaccaaagtggatatcaaacgtacggtagctgccccttcagtttttatctttccgccgtctgacgagcagttaaaatccgggaccgcttctgtagtttgcctgctgaataatttttatccgcgtgaggctaaagtacaatggaaagtcgacaatgctttgcagtcgggaaattcacaggaaagtgttacggagcaggattctaaagattccacatattcactcagctccacccttacactgagcaaagccgactatgaaaaacataaagtttacgcatgtgaggtgacgcaccaaggattatccagtccggtcacaaaatcgtttaaccgcggtgagtgt

SEQ ID NO: 520 - DNA, 642 bp, Synthetic construct
  source 1..642: mol_type = other DNA
gacatccagatgacccagtctccatcctccctgtctgcttctgtcggagacagagtcaccatcacttgccgggcaagtcagggcattagaaatgatttaggctggtatcagcagaaaccagggaaagcccctaagcgcctgatctatgctgcatccagtttgcaaagtggggtcccatcaaggttcagcggcagtggatctgggacagaattcactctcgcaatcagcagcctgcagcctgaagattttgcaacttattactgtctacactttaatagttacccattcactttcggccctgggaccaaagtggatatcaaacgtacggtagctgccccttcagtttttatctttccgccgtctgacgagcagttaaaatccgggaccgcttctgtagtttgcctgctgaataatttttatccgcgtgaggctaaagtacaatggaaagtcgacaatgctttgcagtcgggaaattcacaggaaagtgttacggagcaggattctaaagattccacatattcactcagctccacccttacactgagcaaagccgactatgaaaaacataaagtttacgcatgtgaggtgacgcaccaaggattatccagtccggtcacaaaatcgtttaaccgcggtgagtgt

SEQ ID NO: 521 - DNA, 642 bp, Synthetic construct
  source 1..642: mol_type = other DNA
gacatccagatgacccagtctccatcctccctgtctgcatctgtaggagacagagtcaccatcacttgccgggcaagtcagaacattaacaactatttaaattggttccggcagaaaccagggaaagcccctaagctcctgatctttgctgcatccagtttacaaagtggggtcccatcaagattcagtggcagtgaatctgggacagatttcactctcaccatcagcagtctgcaacctgaggattttgcgacttactactgtcaacagagttacagtacccctctcactttcggcggagggaccaaggtggagatcaaacgtacggtagctgccccttcagtttttatctttccgccgtctgacgagcagttaaaatccgggaccgcttctgtagtttgcctgctgaataatttttatccgcgtgaggctaaagtacaatggaaagtcgacaatgctttgcagtcgggaaattcacaggaaagtgttacggagcaggattctaaagattccacatattcactcagctccacccttacactgagcaaagccgactatgaaaaacataaagtttacgcatgtgaggtgacgcaccaaggattatccagtccggtcacaaaatcgtttaaccgcggtgagtgt

SEQ ID NO: 522 - DNA, 660 bp, Synthetic construct
  source 1..660: mol_type = other DNA
gacatcgtgatgactcagtctccagactccctggctgtgtctctgggcgagagggccaccatcaactgcaagtccagccagagtgttttatacagctccaacaataagaactacttagcttggtaccagcagaaaccaggacagcctcctgagctgctcatttactgggcatctacccgggaatccggggtccctgaccgattcagtggcagcgggtctgggacagatttcactctcaccatcagcagcctgcaggctgaagatatggcagtttattactgtcaacaattttataatactccgtacacttttggccaggggaccaaagtggatatcaaacgtacggtagctgccccttcagtttttatctttccgccgtctgacgagcagttaaaatccgggaccgcttctgtagtttgcctgctgaataatttttatccgcgtgaggctaaagtacaatggaaagtcgacaatgctttgcagtcgggaaattcacaggaaagtgttacggagcaggattctaaagattccacatattcactcagctccacccttacactgagcaaagccgactatgaaaaacataaagtttacgcatgtgaggtgacgcaccaaggattatccagtccggtcacaaaatcgtttaaccgcggtgagtgt

SEQ ID NO: 523 - DNA, 645 bp, Synthetic construct
  source 1..645: mol_type = other DNA
gaaattgtgttgacgcagtctccaggcaccctgtctttgtctccaggggaaagagccaccctctcctgcagggccagtcagagtgttagcagcagctacttagcctggtaccagcagaaacctggccaggctcccaggctcctcatctatggtgcatccagcagggccactggcatcccagacaggttcagtggcagtgggtctgggacagacttcactctcaccatcagcagactggagcctgaagattttgcagtgtattactgtcagcattatggtaactcaccgctcactttcggcggagggaccaaggtggagatcaaacgtacggtagctgccccttcagtttttatctttccgccgtctgacgagcagttaaaatccgggaccgcttctgtagtttgcctgctgaataatttttatccgcgtgaggctaaagtacaatggaaagtcgacaatgctttgcagtcgggaaattcacaggaaagtgttacggagcaggattctaaagattccacatattcactcagctccacccttacactgagcaaagccgactatgaaaaacataaagtttacgcatgtgaggtgacgcaccaaggattatccagtccggtcacaaaatcgtttaaccgcggtgagtgt

SEQ ID NO: 524 - DNA, 639 bp, Synthetic construct
  source 1..639: mol_type = other DNA
gaaatagtgatgacgcagtctccagccaccctgtctgtgtctccaggggaaagagccaccctctcctgcagggccagtcagagtgttagcagcaacttagcctggtaccagcagaaacctggccaggctcccaggctcctcatctatggtgcatccaccagggccactggtatcccagtcaggttcagtggcagtgggtctgggacacagttcactctcaccatcagcagcctgcagtctgaagattttgcagtttattattgtcagcaatatgataactggcggacgttcggccaagggacacgactggagattaaacgtacggtagctgccccttcagtttttatctttccgccgtctgacgagcagttaaaatccgggaccgcttctgtagtttgcctgctgaataatttttatccgcgtgaggctaaagtacaatggaaagtcgacaatgctttgcagtcgggaaattcacaggaaagtgttacggagcaggattctaaagattccacatattcactcagctccacccttacactgagcaaagccgactatgaaaaacataaagtttacgcatgtgaggtgacgcaccaaggattatccagtccggtcacaaaatcgtttaaccgcggtgagtgt

SEQ ID NO: 525 - DNA, 639 bp, Synthetic construct
  source 1..639: mol_type = other DNA
gaaatagtgatgacgcagtctccagccaccctgtctgtgtctccaggggaaagagccaccctctcctgcagggccagtcagagtgttagcagcaacttagcctggtaccagcagaaacctggccaggctcccaggctcctcatctatggtgcatccaccagggccactggtatcccagtcaggttcagtggcagtgggtctgggacacagttcactctcaccatcagcagcctgcagtctgaagattttgcagtttattattgtcagcaatatgataactggcggacgttcggccaagggaccaagctggaaatcaaacgtacggtagctgccccttcagtttttatctttccgccgtctgacgagcagttaaaatccgggaccgcttctgtagtttgcctgctgaataatttttatccgcgtgaggctaaagtacaatggaaagtcgacaatgctttgcagtcgggaaattcacaggaaagtgttacggagcaggattctaaagattccacatattcactcagctccacccttacactgagcaaagccgactatgaaaaacataaagtttacgcatgtgaggtgacgcaccaaggattatccagtccggtcacaaaatcgtttaaccgcggtgagtgt

SEQ ID NO: 526 - DNA, 642 bp, Synthetic construct
  source 1..642: mol_type = other DNA
gacatccagatgacccagtctccatcttccgtgtctgcatctgtcggagacagagtcaccatcacttgtcgggcgagtcagagttttgccggctggttagcctggtatcagcagaaaccagggaaagcccctaagctcctgatatatgctgcatccactttgcaaagtggggtcccatcaaggttcagcggcagtggatctgggacagatttcactctcaccatcagcagcctgcagcctgaagattttgcaacttactattgtcaacaggctaacagtttccctctcactttcggcggagggaccaaggtggagatcaaacgtacggtagctgccccttcagtttttatctttccgccgtctgacgagcagttaaaatccgggaccgcttctgtagtttgcctgctgaataatttttatccgcgtgaggctaaagtacaatggaaagtcgacaatgctttgcagtcgggaaattcacaggaaagtgttacggagcaggattctaaagattccacatattcactcagctccacccttacactgagcaaagccgactatgaaaaacataaagtttacgcatgtgaggtgacgcaccaaggattatccagtccggtcacaaaatcgtttaaccgcggtgagtgt

SEQ ID NO: 527 - DNA, 660 bp, Synthetic construct
  source 1..660: mol_type = other DNA
gacatcgtgatgacccagtctccagactccctggctgtgtctctgggcgagagggccaccatcaactgcaagtccagtcagagtgttttatacagctccaacaataagaattacttagcttggtaccaccagaaaccaggacagcctcctaagctgctcatttactgggcatctacccgggaatccggggtccctgaccgattcagtggcagcgggtctgggacagatttcactctcaccatcagcagcctgcaggctgaagatgtggcagtttattactgtcagcaatactatagtagtcctcggacgttcggccaagggaccaaggtggaaatcaaacgtacggtagctgccccttcagtttttatctttccgccgtctgacgagcagttaaaatccgggaccgcttctgtagtttgcctgctgaataatttttatccgcgtgaggctaaagtacaatggaaagtcgacaatgctttgcagtcgggaaattcacaggaaagtgttacggagcaggattctaaagattccacatattcactcagctccacccttacactgagcaaagccgactatgaaaaacataaagtttacgcatgtgaggtgacgcaccaaggattatccagtccggtcacaaaatcgtttaaccgcggtgagtgt

SEQ ID NO: 528 - protein, 453 aa, Synthetic construct
QVQLQQSGPGLVKPSQTLSLTCAISGDSVSSNTAAWNWIRQSPSRGLEWLGRTYYRSKWYNDYAVSVKSRITINPDTSKNQFSLQLSSVTPQDTAIYYCASDNWNNGGPGFDPWGQGTLVTVSSASTKGPSVFPLAPSSKSTSGGTAALGCLVKDYFPEPVTVSWNSGALTSGVHTFPAVLQSSGLYSLSSVVTVPSSSLGTQTYICNVNHKPSNTKVDKRVEPKSCDKTHTCPPCPAPELLGGPSVFLFPPKPKDTLMISRTPEVTCVVVDVSHEDPEVKFNWYVDGVEVHNAKTKPREEQYASTYRVVSVLTVLHQDWLNGKEYKCKVSNKALPAPIEKTISKAKGQPREPQVYTLPPSREEMTKNQVSLTCLVKGFYPSDIAVEWESNGQPENNYKTTPPVLDSDGSFFLYSKLTVDKSRWQQGNVFSCSVMHEALHNHYTQKSLSLSPG

SEQ ID NO: 529 - protein, 452 aa, Synthetic construct
QVQLQQSGPGLVKPSQTLSLTCAISGDSVSSNSAAWNWIRQSPSRGLEWLGRTYYRSKWYNGYAVSMKSRITINPDTSKNQFSLQLNSVTPEDTAMYYCAREGVGATTGFDYWGQGTLVTVSSASTKGPSVFPLAPSSKSTSGGTAALGCLVKDYFPEPVTVSWNSGALTSGVHTFPAVLQSSGLYSLSSVVTVPSSSLGTQTYICNVNHKPSNTKVDKRVEPKSCDKTHTCPPCPAPELLGGPSVFLFPPKPKDTLMISRTPEVTCVVVDVSHEDPEVKFNWYVDGVEVHNAKTKPREEQYASTYRVVSVLTVLHQDWLNGKEYKCKVSNKALPAPIEKTISKAKGQPREPQVYTLPPSREEMTKNQVSLTCLVKGFYPSDIAVEWESNGQPENNYKTTPPVLDSDGSFFLYSKLTVDKSRWQQGNVFSCSVMHEALHNHYTQKSLSLSPG

SEQ ID NO: 530 - protein, 452 aa, Synthetic construct
QVQLQQSGPGLVKSSQTLSLTCAISGDTVSSNSAAWNWIRQSPSRGLEWLGRTFYRSRWSAAYAASVSSRITINPDTSKNQFSLQLTSVTPADTAVYYCAREGVGSSTGFDYWGQGTLVTVSSASTKGPSVFPLAPSSKSTSGGTAALGCLVKDYFPEPVTVSWNSGALTSGVHTFPAVLQSSGLYSLSSVVTVPSSSLGTQTYICNVNHKPSNTKVDKRVEPKSCDKTHTCPPCPAPELLGGPSVFLFPPKPKDTLMISRTPEVTCVVVDVSHEDPEVKFNWYVDGVEVHNAKTKPREEQYASTYRVVSVLTVLHQDWLNGKEYKCKVSNKALPAPIEKTISKAKGQPREPQVYTLPPSREEMTKNQVSLTCLVKGFYPSDIAVEWESNGQPENNYKTTPPVLDSDGSFFLYSKLTVDKSRWQQGNVFSCSVMHEALHNHYTQKSLSLSPG

SEQ ID NO: 531 - protein, 453 aa, Synthetic construct
QVQLQQSGPGLVKPSQTLSLTCAISGDSVSSNSAAWNWIRQSPSRGLEWLGRTYYRSKWFNNYSVSVKSRIAINPDTSKNQFSLQLNSVTPEDTAVYYCARDLGELLDWYFDLWGRGTLVTVSAASTKGPSVFPLAPSSKSTSGGTAALGCLVKDYFPEPVTVSWNSGALTSGVHTFPAVLQSSGLYSLSSVVTVPSSSLGTQTYICNVNHKPSNTKVDKRVEPKSCDKTHTCPPCPAPELLGGPSVFLFPPKPKDTLMISRTPEVTCVVVDVSHEDPEVKFNWYVDGVEVHNAKTKPREEQYASTYRVVSVLTVLHQDWLNGKEYKCKVSNKALPAPIEKTISKAKGQPREPQVYTLPPSREEMTKNQVSLTCLVKGFYPSDIAVEWESNGQPENNYKTTPPVLDSDGSFFLYSKLTVDKSRWQQGNVFSCSVMHEALHNHYTQKSLSLSPG

SEQ ID NO: 532 - protein, 453 aa, Synthetic construct
QVQLQQSGPGLVKPSQTLSLTCAISGDSVSSNSAAWNWIRQSPSRGLEWLGMTYYRSKWYSVFAVSVKSRITINTDTSKNQFSLQLNSVTPEDTAVYYCAREGGIVGATPFDYWGQGTLVTVSSASTKGPSVFPLAPSSKSTSGGTAALGCLVKDYFPEPVTVSWNSGALTSGVHTFPAVLQSSGLYSLSSVVTVPSSSLGTQTYICNVNHKPSNTKVDKRVEPKSCDKTHTCPPCPAPELLGGPSVFLFPPKPKDTLMISRTPEVTCVVVDVSHEDPEVKFNWYVDGVEVHNAKTKPREEQYASTYRVVSVLTVLHQDWLNGKEYKCKVSNKALPAPIEKTISKAKGQPREPQVYTLPPSREEMTKNQVSLTCLVKGFYPSDIAVEWESNGQPENNYKTTPPVLDSDGSFFLYSKLTVDKSRWQQGNVFSCSVMHEALHNHYTQKSLSLSPG

SEQ ID NO: 533 - protein, 451 aa, Synthetic construct
QVQLQQSGPGLVKPSQTLSLTCAISGDSVSSNSAAWNWIRQSPSRGLEWLGRTYYRSKLYSDYAVSVKSRITINPDTSRNQFSLQLNSVTPEDTAVYYCAREGGYTYGYDYWGQGTLVTVSSASTKGPSVFPLAPSSKSTSGGTAALGCLVKDYFPEPVTVSWNSGALTSGVHTFPAVLQSSGLYSLSSVVTVPSSSLGTQTYICNVNHKPSNTKVDKRVEPKSCDKTHTCPPCPAPELLGGPSVFLFPPKPKDTLMISRTPEVTCVVVDVSHEDPEVKFNWYVDGVEVHNAKTKPREEQYASTYRVVSVLTVLHQDWLNGKEYKCKVSNKALPAPIEKTISKAKGQPREPQVYTLPPSREEMTKNQVSLTCLVKGFYPSDIAVEWESNGQPENNYKTTPPVLDSDGSFFLYSKLTVDKSRWQQGNVFSCSVMHEALHNHYTQKSLSLSPG

SEQ ID NO: 534 - protein, 451 aa, Synthetic construct
QVQLQQSGPGLVKPSQTLSLTCAISGDSVSSNNAAWNWIRQSPSRGLEWLGRTYYRSKWYNAYAVSVKSRIIINPDTSRNQFSLQLNSVTPEDTAVYYCAREGGYIYGLDQWGQGTLVTVSSASTKGPSVFPLAPSSKSTSGGTAALGCLVKDYFPEPVTVSWNSGALTSGVHTFPAVLQSSGLYSLSSVVTVPSSSLGTQTYICNVNHKPSNTKVDKRVEPKSCDKTHTCPPCPAPELLGGPSVFLFPPKPKDTLMISRTPEVTCVVVDVSHEDPEVKFNWYVDGVEVHNAKTKPREEQYASTYRVVSVLTVLHQDWLNGKEYKCKVSNKALPAPIEKTISKAKGQPREPQVYTLPPSREEMTKNQVSLTCLVKGFYPSDIAVEWESNGQPENNYKTTPPVLDSDGSFFLYSKLTVDKSRWQQGNVFSCSVMHEALHNHYTQKSLSLSPG

SEQ ID NO: 535 - protein, 453 aa, Synthetic construct
QVQLQQSGPGLVKPSQTLSLTCAISGDSVSSNSAAWNWIRQSPSRGLEWLGKTYYRSKWYNYYALSVKSRITINPDTSKNQFSLHLNSVTPEDTAVYYCARDGDYYLPSPFDLWGHGTMVTVSSASTKGPSVFPLAPSSKSTSGGTAALGCLVKDYFPEPVTVSWNSGALTSGVHTFPAVLQSSGLYSLSSVVTVPSSSLGTQTYICNVNHKPSNTKVDKRVEPKSCDKTHTCPPCPAPELLGGPSVFLFPPKPKDTLMISRTPEVTCVVVDVSHEDPEVKFNWYVDGVEVHNAKTKPREEQYASTYRVVSVLTVLHQDWLNGKEYKCKVSNKALPAPIEKTISKAKGQPREPQVYTLPPSREEMTKNQVSLTCLVKGFYPSDIAVEWESNGQPENNYKTTPPVLDSDGSFFLYSKLTVDKSRWQQGNVFSCSVMHEALHNHYTQKSLSLSPG

SEQ ID NO: 536 - protein, 453 aa, Synthetic construct
QVQLQQSGPGLVKPSQTLSLTCAISGDSVSSNSAAWNWIRQSPSRGLEWLGRTYYRSKWYSDYPLSVKSRITINPDTSKNQFSLQLNSVTPEDTAVYYCARDSGIVETTPFDYWGQGTLVTVSSASTKGPSVFPLAPSSKSTSGGTAALGCLVKDYFPEPVTVSWNSGALTSGVHTFPAVLQSSGLYSLSSVVTVPSSSLGTQTYICNVNHKPSNTKVDKRVEPKSCDKTHTCPPCPAPELLGGPSVFLFPPKPKDTLMISRTPEVTCVVVDVSHEDPEVKFNWYVDGVEVHNAKTKPREEQYASTYRVVSVLTVLHQDWLNGKEYKCKVSNKALPAPIEKTISKAKGQPREPQVYTLPPSREEMTKNQVSLTCLVKGFYPSDIAVEWESNGQPENNYKTTPPVLDSDGSFFLYSKLTVDKSRWQQGNVFSCSVMHEALHNHYTQKSLSLSPG

SEQ ID NO: 537 - protein, 453 aa, Synthetic construct
QVQLQQSGPGLVKPSQTLSLTCAISGDSVSSNSASWNWIRQSPSRGLEWLGTTYYRSKWFNVYAVSVKSRITINPDTSKNQFSLHLNSVTPEDTAIYFCTRDRGDLLHWYFDLWGRGTLVTVSSASTKGPSVFPLAPSSKSTSGGTAALGCLVKDYFPEPVTVSWNSGALTSGVHTFPAVLQSSGLYSLSSVVTVPSSSLGTQTYICNVNHKPSNTKVDKRVEPKSCDKTHTCPPCPAPELLGGPSVFLFPPKPKDTLMISRTPEVTCVVVDVSHEDPEVKFNWYVDGVEVHNAKTKPREEQYASTYRVVSVLTVLHQDWLNGKEYKCKVSNKALPAPIEKTISKAKGQPREPQVYTLPPSREEMTKNQVSLTCLVKGFYPSDIAVEWESNGQPENNYKTTPPVLDSDGSFFLYSKLTVDKSRWQQGNVFSCSVMHEALHNHYTQKSLSLSPG

SEQ ID NO: 538 - protein, 453 aa, Synthetic construct
QVQLQQSGPGLVKPSQTLSLTCAISGDSVSSNSAAWNWIRQSPSRGLEWLGRTYYRSKWFNDYALSVKSRITINPDTSKNQFSLHLNSVTPEDTAVYYCAREPGIVAPGPFDYWGQGTLVTVSSASTKGPSVFPLAPSSKSTSGGTAALGCLVKDYFPEPVTVSWNSGALTSGVHTFPAVLQSSGLYSLSSVVTVPSSSLGTQTYICNVNHKPSNTKVDKRVEPKSCDKTHTCPPCPAPELLGGPSVFLFPPKPKDTLMISRTPEVTCVVVDVSHEDPEVKFNWYVDGVEVHNAKTKPREEQYASTYRVVSVLTVLHQDWLNGKEYKCKVSNKALPAPIEKTISKAKGQPREPQVYTLPPSREEMTKNQVSLTCLVKGFYPSDIAVEWESNGQPENNYKTTPPVLDSDGSFFLYSKLTVDKSRWQQGNVFSCSVMHEALHNHYTQKSLSLSPG

SEQ ID NO: 539 - protein, 453 aa, Synthetic construct
QVQLQQSGPGLVKPTQTLSLTCAISGDSVSSNSAAWNWIRQSPSRGLEWLGRTYYRSKWFNGYAVSVKSRITINPDASKNQFSLHLKSVTDEDTAVYYCATDRGELLHWYFDLWGRGTLVTVSSASTKGPSVFPLAPSSKSTSGGTAALGCLVKDYFPEPVTVSWNSGALTSGVHTFPAVLQSSGLYSLSSVVTVPSSSLGTQTYICNVNHKPSNTKVDKRVEPKSCDKTHTCPPCPAPELLGGPSVFLFPPKPKDTLMISRTPEVTCVVVDVSHEDPEVKFNWYVDGVEVHNAKTKPREEQYASTYRVVSVLTVLHQDWLNGKEYKCKVSNKALPAPIEKTISKAKGQPREPQVYTLPPSREEMTKNQVSLTCLVKGFYPSDIAVEWESNGQPENNYKTTPPVLDSDGSFFLYSKLTVDKSRWQQGNVFSCSVMHEALHNHYTQKSLSLSPG

SEQ ID NO: 540 - protein, 453 aa, Synthetic construct
QVQLQQSGPGLVKSSQTLSITCAISGDSVSSNSAAWNWIRQSPSRGLEWLGRTYYRSKWYNDYALSVKSRIIIKSDTSKNQFSLQLNSVTPEDTAVYYCAREPGIAAPGPFDYWGQGSLVTVSSASTKGPSVFPLAPSSKSTSGGTAALGCLVKDYFPEPVTVSWNSGALTSGVHTFPAVLQSSGLYSLSSVVTVPSSSLGTQTYICNVNHKPSNTKVDKRVEPKSCDKTHTCPPCPAPELLGGPSVFLFPPKPKDTLMISRTPEVTCVVVDVSHEDPEVKFNWYVDGVEVHNAKTKPREEQYASTYRVVSVLTVLHQDWLNGKEYKCKVSNKALPAPIEKTISKAKGQPREPQVYTLPPSREEMTKNQVSLTCLVKGFYPSDIAVEWESNGQPENNYKTTPPVLDSDGSFFLYSKLTVDKSRWQQGNVFSCSVMHEALHNHYTQKSLSLSPG

SEQ ID NO: 541 - DNA, 1359 bp, Synthetic construct
  source 1..1359: mol_type = other DNA
caggtacagctgcagcagtcaggtccaggactggtgaagccctcgcagaccctctcactcacctgtgccatttccggggacagtgtctctagcaacactgctgcttggaactggatcaggcagtccccatcgagaggccttgagtggctgggaaggacatactacaggtccaagtggtataatgattatgcagtatctgtgaaaagtcgaataaccatcaacccagacacatccaagaaccagttctccctgcagttgagctctgtgactccccaggacacggctatatattactgtgcgagcgataactggaacaacggaggccctgggttcgacccctggggccagggaaccctggtcaccgtctcctcagctagcactaaagggccttctgtatttcccttggccccgtccagcaaatcgacctcgggagggacagccgccctgggttgccttgtgaaagattatttccctgagccagttaccgtaagttggaacagtggggcgctgacaagtggtgtgcacacgtttcctgccgtcctgcaatcatcgggcttgtatagcctcagctctgtggtcactgtcccaagttcatcgctgggcactcagacgtatatttgcaatgtgaaccacaaaccttcaaatacaaaagtggataaacgcgtagaaccgaaatcgtgtgataaaactcacacatgcccgccatgcccggcacctgaactgcttggtggtcccagcgtgttcctgttcccgccgaagcctaaagatactctaatgatcagccgtacgccagaggtgacatgtgtcgtggttgacgtgtcccacgaagatcccgaagttaagttcaattggtatgttgatggtgtagaggtacacaatgctaagactaaacctcgcgaggagcagtacgcctcgacctatcgtgtcgtgagcgttctgaccgtccttcaccaagattggcttaacggcaaagaatataagtgcaaggtaagcaataaagcacttccggccccaatcgagaaaaccatttccaaggccaaaggtcaaccaagagaaccccaggtgtatactcttccgccttctcgtgaggaaatgactaaaaatcaagtatcccttacgtgtctggttaaaggtttttatcctagcgatattgctgttgaatgggaatcgaacggtcagccggagaataattataaaacaacgccacccgtcctggatagcgacggctcattttttctgtatagcaaactgactgtagataaatcacggtggcagcagggcaatgtattcagttgctccgttatgcatgaagcgttacataatcactacacgcagaaatctcttagtctttcacccggt

SEQ ID NO: 542 - DNA, 1356 bp, Synthetic construct
  source 1..1356: mol_type = other DNA
caggtacagctgcagcagtcaggtccaggactggtgaagccctcgcagaccctctcactcacctgtgccatctccggggacagtgtctctagcaacagtgctgcttggaactggatcaggcagtccccatcgagaggccttgagtggctgggaaggacatactacaggtccaagtggtataatggttatgcagtctctatgaaaagtcgaataaccatcaacccagacacatccaagaaccagttctccctgcagctgaactctgtgactcccgaggacacggctatgtattattgtgcaagagagggagtgggagctactacaggctttgactactggggccagggaaccctggtcaccgtctcctcagctagcactaaagggccttctgtatttcccttggccccgtccagcaaatcgacctcgggagggacagccgccctgggttgccttgtgaaagattatttccctgagccagttaccgtaagttggaacagtggggcgctgacaagtggtgtgcacacgtttcctgccgtcctgcaatcatcgggcttgtatagcctcagctctgtggtcactgtcccaagttcatcgctgggcactcagacgtatatttgcaatgtgaaccacaaaccttcaaatacaaaagtggataaacgcgtagaaccgaaatcgtgtgataaaactcacacatgcccgccatgcccggcacctgaactgcttggtggtcccagcgtgttcctgttcccgccgaagcctaaagatactctaatgatcagccgtacgccagaggtgacatgtgtcgtggttgacgtgtcccacgaagatcccgaagttaagttcaattggtatgttgatggtgtagaggtacacaatgctaagactaaacctcgcgaggagcagtacgcctcgacctatcgtgtcgtgagcgttctgaccgtccttcaccaagattggcttaacggcaaagaatataagtgcaaggtaagcaataaagcacttccggccccaatcgagaaaaccatttccaaggccaaaggtcaaccaagagaaccccaggtgtatactcttccgccttctcgtgaggaaatgactaaaaatcaagtatcccttacgtgtctggttaaaggtttttatcctagcgatattgctgttgaatgggaatcgaacggtcagccggagaataattataaaacaacgccacccgtcctggatagcgacggctcattttttctgtatagcaaactgactgtagataaatcacggtggcagcagggcaatgtattcagttgctccgttatgcatgaagcgttacataatcactacacgcagaaatctcttagtctttcacccggt

SEQ ID NO: 543 - DNA, 1356 bp, Synthetic construct
  source 1..1356: mol_type = other DNA
caggtacagctgcagcagtcaggtccaggactggtgaagtcctcgcagaccctctcactcacctgtgccatctccggggacactgtctctagtaatagtgctgcttggaactggatcaggcagtccccatcgagaggccttgagtggctgggaaggacattctataggtccaggtggtctgctgcttatgcagcgtctgtgagtagtcgaataaccatcaacccagacacatccaagaaccagttctccctgcagctgacctctgtgactcccgcggacacggctgtgtattactgtgcaagagagggagtaggatcttctacaggctttgactactggggccagggaaccctggtcaccgtctcctcagctagcactaaagggccttctgtatttcccttggccccgtccagcaaatcgacctcgggagggacagccgccctgggttgccttgtgaaagattatttccctgagccagttaccgtaagttggaacagtggggcgctgacaagtggtgtgcacacgtttcctgccgtcctgcaatcatcgggcttgtatagcctcagctctgtggtcactgtcccaagttcatcgctgggcactcagacgtatatttgcaatgtgaaccacaaaccttcaaatacaaaagtggataaacgcgtagaaccgaaatcgtgtgataaaactcacacatgcccgccatgcccggcacctgaactgcttggtggtcccagcgtgttcctgttcccgccgaagcctaaagatactctaatgatcagccgtacgccagaggtgacatgtgtcgtggttgacgtgtcccacgaagatcccgaagttaagttcaattggtatgttgatggtgtagaggtacacaatgctaagactaaacctcgcgaggagcagtacgcctcgacctatcgtgtcgtgagcgttctgaccgtccttcaccaagattggcttaacggcaaagaatataagtgcaaggtaagcaataaagcacttccggccccaatcgagaaaaccatttccaaggccaaaggtcaaccaagagaaccccaggtgtatactcttccgccttctcgtgaggaaatgactaaaaatcaagtatcccttacgtgtctggttaaaggtttttatcctagcgatattgctgttgaatgggaatcgaacggtcagccggagaataattataaaacaacgccacccgtcctggatagcgacggctcattttttctgtatagcaaactgactgtagataaatcacggtggcagcagggcaatgtattcagttgctccgttatgcatgaagcgttacataatcactacacgcagaaatctcttagtctttcacccggt

SEQ ID NO: 544 - DNA, 1359 bp, Synthetic construct
  source 1..1359: mol_type = other DNA
caggtacagctgcagcagtcaggtccaggactggtgaagccctcgcagaccctctcactcacctgtgccatctccggggacagtgtctctagcaacagtgctgcttggaactggatcaggcagtccccatcgagaggccttgagtggctgggaaggacatactacaggtccaagtggtttaataattattcagtttctgtgaaaagtcgaatagccattaacccagacacatccaagaaccagttctcccttcaactgaactctgtgactcccgaggacacggctgtgtattactgtgcaagagatctgggggagttacttgactggtacttcgatctctggggccgtggcaccctggtcactgtctccgcagctagcactaaagggccttctgtatttcccttggccccgtccagcaaatcgacctcgggagggacagccgccctgggttgccttgtgaaagattatttccctgagccagttaccgtaagttggaacagtggggcgctgacaagtggtgtgcacacgtttcctgccgtcctgcaatcatcgggcttgtatagcctcagctctgtggtcactgtcccaagttcatcgctgggcactcagacgtatatttgcaatgtgaaccacaaaccttcaaatacaaaagtggataaacgcgtagaaccgaaatcgtgtgataaaactcacacatgcccgccatgcccggcacctgaactgcttggtggtcccagcgtgttcctgttcccgccgaagcctaaagatactctaatgatcagccgtacgccagaggtgacatgtgtcgtggttgacgtgtcccacgaagatcccgaagttaagttcaattggtatgttgatggtgtagaggtacacaatgctaagactaaacctcgcgaggagcagtacgcctcgacctatcgtgtcgtgagcgttctgaccgtccttcaccaagattggcttaacggcaaagaatataagtgcaaggtaagcaataaagcacttccggccccaatcgagaaaaccatttccaaggccaaaggtcaaccaagagaaccccaggtgtatactcttccgccttctcgtgaggaaatgactaaaaatcaagtatcccttacgtgtctggttaaaggtttttatcctagcgatattgctgttgaatgggaatcgaacggtcagccggagaataattataaaacaacgccacccgtcctggatagcgacggctcattttttctgtatagcaaactgactgtagataaatcacggtggcagcagggcaatgtattcagttgctccgttatgcatgaagcgttacataatcactacacgcagaaatctcttagtctttcacccggt

SEQ ID NO: 545 - DNA, 1359 bp, Synthetic construct
  source 1..1359: mol_type = other DNA
caggtacagctgcagcagtcaggtccaggactggtgaagccctcgcagaccctctcactcacctgtgccatctccggggacagtgtctctagcaacagtgctgcttggaactggatcaggcagtccccatcgagaggccttgagtggctgggaatgacatactacaggtccaagtggtatagtgtttttgcagtatctgtgaaaagtcgaataaccatcaatacagacacatccaagaaccagttctccctgcagctgaactctgtgactcccgaggacacggctgtgtattactgtgcaagagaggggggtatagtgggagccaccccctttgactactggggccagggaaccctggtcaccgtctcttcagctagcactaaagggccttctgtatttcccttggccccgtccagcaaatcgacctcgggagggacagccgccctgggttgccttgtgaaagattatttccctgagccagttaccgtaagttggaacagtggggcgctgacaagtggtgtgcacacgtttcctgccgtcctgcaatcatcgggcttgtatagcctcagctctgtggtcactgtcccaagttcatcgctgggcactcagacgtatatttgcaatgtgaaccacaaaccttcaaatacaaaagtggataaacgcgtagaaccgaaatcgtgtgataaaactcacacatgcccgccatgcccggcacctgaactgcttggtggtcccagcgtgttcctgttcccgccgaagcctaaagatactctaatgatcagccgtacgccagaggtgacatgtgtcgtggttgacgtgtcccacgaagatcccgaagttaagttcaattggtatgttgatggtgtagaggtacacaatgctaagactaaacctcgcgaggagcagtacgcctcgacctatcgtgtcgtgagcgttctgaccgtccttcaccaagattggcttaacggcaaagaatataagtgcaaggtaagcaataaagcacttccggccccaatcgagaaaaccatttccaaggccaaaggtcaaccaagagaaccccaggtgtatactcttccgccttctcgtgaggaaatgactaaaaatcaagtatcccttacgtgtctggttaaaggtttttatcctagcgatattgctgttgaatgggaatcgaacggtcagccggagaataattataaaacaacgccacccgtcctggatagcgacggctcattttttctgtatagcaaactgactgtagataaatcacggtggcagcagggcaatgtattcagttgctccgttatgcatgaagcgttacataatcactacacgcagaaatctcttagtctttcacccggt

SEQ ID NO: 546 - DNA, 1353 bp, Synthetic construct
  source 1..1353: mol_type = other DNA
caggtacagctgcagcagtcaggtccaggactggtgaagccctcgcagaccctctcactcacctgtgccatctccggggacagtgtctctagcaacagtgctgcttggaactggatcaggcagtccccatcgagaggccttgagtggctgggcaggacatactacaggtccaagttgtatagtgattatgcagtatctgtgaaaagtcgaataaccatcaacccagacacatccaggaaccagttctccctgcagctgaactctgtgactcccgaggacacggctgtgtattactgtgcaagagaggggggatacacctatggttatgactactggggccagggaaccctggtcaccgtctcctcagctagcactaaagggccttctgtatttcccttggccccgtccagcaaatcgacctcgggagggacagccgccctgggttgccttgtgaaagattatttccctgagccagttaccgtaagttggaacagtggggcgctgacaagtggtgtgcacacgtttcctgccgtcctgcaatcatcgggcttgtatagcctcagctctgtggtcactgtcccaagttcatcgctgggcactcagacgtatatttgcaatgtgaaccacaaaccttcaaatacaaaagtggataaacgcgtagaaccgaaatcgtgtgataaaactcacacatgcccgccatgcccggcacctgaactgcttggtggtcccagcgtgttcctgttcccgccgaagcctaaagatactctaatgatcagccgtacgccagaggtgacatgtgtcgtggttgacgtgtcccacgaagatcccgaagttaagttcaattggtatgttgatggtgtagaggtacacaatgctaagactaaacctcgcgaggagcagtacgcctcgacctatcgtgtcgtgagcgttctgaccgtccttcaccaagattggcttaacggcaaagaatataagtgcaaggtaagcaataaagcacttccggccccaatcgagaaaaccatttccaaggccaaaggtcaaccaagagaaccccaggtgtatactcttccgccttctcgtgaggaaatgactaaaaatcaagtatcccttacgtgtctggttaaaggtttttatcctagcgatattgctgttgaatgggaatcgaacggtcagccggagaataattataaaacaacgccacccgtcctggatagcgacggctcattttttctgtatagcaaactgactgtagataaatcacggtggcagcagggcaatgtattcagttgctccgttatgcatgaagcgttacataatcactacacgcagaaatctcttagtctttcacccggt

SEQ ID NO: 547 - DNA, 1353 bp, Synthetic construct
  source 1..1353: mol_type = other DNA
caggtacagctgcagcagtcaggtccaggactggtgaagccctcgcagaccctctcactcacctgtgccatctccggggacagtgtctctagcaacaatgctgcttggaactggatcaggcagtccccatcgagaggccttgagtggctgggaaggacgtactacaggtccaagtggtataatgcttatgcagtttctgtgaaaagtcgaattatcatcaatccagacacatccaggaaccagttctccctgcaactgaactctgtgactcccgaggacacggctgtgtattactgtgcaagagagggtggatacatctatggtcttgaccaatggggccagggaaccctggtcaccgtctcctcagctagcactaaagggccttctgtatttcccttggccccgtccagcaaatcgacctcgggagggacagccgccctgggttgccttgtgaaagattatttccctgagccagttaccgtaagttggaacagtggggcgctgacaagtggtgtgcacacgtttcctgccgtcctgcaatcatcgggcttgtatagcctcagctctgtggtcactgtcccaagttcatcgctgggcactcagacgtatatttgcaatgtgaaccacaaaccttcaaatacaaaagtggataaacgcgtagaaccgaaatcgtgtgataaaactcacacatgcccgccatgcccggcacctgaactgcttggtggtcccagcgtgttcctgttcccgccgaagcctaaagatactctaatgatcagccgtacgccagaggtgacatgtgtcgtggttgacgtgtcccacgaagatcccgaagttaagttcaattggtatgttgatggtgtagaggtacacaatgctaagactaaacctcgcgaggagcagtacgcctcgacctatcgtgtcgtgagcgttctgaccgtccttcaccaagattggcttaacggcaaagaatataagtgcaaggtaagcaataaagcacttccggccccaatcgagaaaaccatttccaaggccaaaggtcaaccaagagaaccccaggtgtatactcttccgccttctcgtgaggaaatgactaaaaatcaagtatcccttacgtgtctggttaaaggtttttatcctagcgatattgctgttgaatgggaatcgaacggtcagccggagaataattataaaacaacgccacccgtcctggatagcgacggctcattttttctgtatagcaaactgactgtagataaatcacggtggcagcagggcaatgtattcagttgctccgttatgcatgaagcgttacataatcactacacgcagaaatctcttagtctttcacccggt

SEQ ID NO: 548 - DNA, 1359 bp, Synthetic construct
  source 1..1359: mol_type = other DNA
caggtgcagctgcagcagtcgggtccaggactggtgaagccctcgcagaccctctcactcacctgtgccatctccggggacagtgtctctagcaacagtgctgcttggaactggatcaggcagtccccatcgagaggccttgagtggctgggaaagacatactacaggtccaagtggtataattattatgcactatctgtgaaaagtcgaataaccatcaacccagacacatccaagaaccagttctccctgcacctgaactctgtgactcccgaggacacggctgtgtattactgtgcaagagacggtgactactaccttccctctccttttgatctctggggccacgggacaatggtcaccgtctcctcagctagcactaaagggccttctgtatttcccttggccccgtccagcaaatcgacctcgggagggacagccgccctgggttgccttgtgaaagattatttccctgagccagttaccgtaagttggaacagtggggcgctgacaagtggtgtgcacacgtttcctgccgtcctgcaatcatcgggcttgtatagcctcagctctgtggtcactgtcccaagttcatcgctgggcactcagacgtatatttgcaatgtgaaccacaaaccttcaaatacaaaagtggataaacgcgtagaaccgaaatcgtgtgataaaactcacacatgcccgccatgcccggcacctgaactgcttggtggtcccagcgtgttcctgttcccgccgaagcctaaagatactctaatgatcagccgtacgccagaggtgacatgtgtcgtggttgacgtgtcccacgaagatcccgaagttaagttcaattggtatgttgatggtgtagaggtacacaatgctaagactaaacctcgcgaggagcagtacgcctcgacctatcgtgtcgtgagcgttctgaccgtccttcaccaagattggcttaacggcaaagaatataagtgcaaggtaagcaataaagcacttccggccccaatcgagaaaaccatttccaaggccaaaggtcaaccaagagaaccccaggtgtatactcttccgccttctcgtgaggaaatgactaaaaatcaagtatcccttacgtgtctggttaaaggtttttatcctagcgatattgctgttgaatgggaatcgaacggtcagccggagaataattataaaacaacgccacccgtcctggatagcgacggctcattttttctgtatagcaaactgactgtagataaatcacggtggcagcagggcaatgtattcagttgctccgttatgcatgaagcgttacataatcactacacgcagaaatctcttagtctttcacccggt

SEQ ID NO: 549 - DNA, 1359 bp, Synthetic construct
  source 1..1359: mol_type = other DNA
caggtacagctgcagcagtcaggtccaggactggtgaagccctcgcagaccctctcactcacctgtgccatctccggggacagtgtctctagcaacagtgctgcttggaactggatcaggcagtccccatcgagaggccttgagtggctgggaaggacatactacaggtccaagtggtatagtgattatccactatctgtgaaaagtcgaataaccatcaaccccgacacatccaagaaccagttctccctgcagctgaactctgtgactcccgaggacacggctgtgtattactgtgcaagagactccggtatagttgaaaccacgccctttgactattggggccagggaaccctggtcaccgtctcctcagctagcactaaagggccttctgtatttcccttggccccgtccagcaaatcgacctcgggagggacagccgccctgggttgccttgtgaaagattatttccctgagccagttaccgtaagttggaacagtggggcgctgacaagtggtgtgcacacgtttcctgccgtcctgcaatcatcgggcttgtatagcctcagctctgtggtcactgtcccaagttcatcgctgggcactcagacgtatatttgcaatgtgaaccacaaaccttcaaatacaaaagtggataaacgcgtagaaccgaaatcgtgtgataaaactcacacatgcccgccatgcccggcacctgaactgcttggtggtcccagcgtgttcctgttcccgccgaagcctaaagatactctaatgatcagccgtacgccagaggtgacatgtgtcgtggttgacgtgtcccacgaagatcccgaagttaagttcaattggtatgttgatggtgtagaggtacacaatgctaagactaaacctcgcgaggagcagtacgcctcgacctatcgtgtcgtgagcgttctgaccgtccttcaccaagattggcttaacggcaaagaatataagtgcaaggtaagcaataaagcacttccggccccaatcgagaaaaccatttccaaggccaaaggtcaaccaagagaaccccaggtgtatactcttccgccttctcgtgaggaaatgactaaaaatcaagtatcccttacgtgtctggttaaaggtttttatcctagcgatattgctgttgaatgggaatcgaacggtcagccggagaataattataaaacaacgccacccgtcctggatagcgacggctcattttttctgtatagcaaactgactgtagataaatcacggtggcagcagggcaatgtattcagttgctccgttatgcatgaagcgttacataatcactacacgcagaaatctcttagtctttcacccggt

SEQ ID NO: 550 - DNA, 1359 bp, Synthetic construct
  source 1..1359: mol_type = other DNA
caggtacagctgcagcagtcaggtccaggactggtgaagccctcgcagaccctctcactcacctgtgccatctccggggacagtgtctctagtaacagtgcttcttggaactggatcaggcagtccccttcgagaggccttgagtggctgggaacgacatactacaggtccaagtggtttaatgtttatgcagtctctgtgaaaagtcgaataaccatcaacccagacacatccaagaaccaattctccctgcacctgaactctgtgactcccgaggacacggctatatatttctgtacaagagatcggggggacctactccactggtacttcgatctctggggccgtggcaccctggtcactgtctcctcagctagcactaaagggccttctgtatttcccttggccccgtccagcaaatcgacctcgggagggacagccgccctgggttgccttgtgaaagattatttccctgagccagttaccgtaagttggaacagtggggcgctgacaagtggtgtgcacacgtttcctgccgtcctgcaatcatcgggcttgtatagcctcagctctgtggtcactgtcccaagttcatcgctgggcactcagacgtatatttgcaatgtgaaccacaaaccttcaaatacaaaagtggataaacgcgtagaaccgaaatcgtgtgataaaactcacacatgcccgccatgcccggcacctgaactgcttggtggtcccagcgtgttcctgttcccgccgaagcctaaagatactctaatgatcagccgtacgccagaggtgacatgtgtcgtggttgacgtgtcccacgaagatcccgaagttaagttcaattggtatgttgatggtgtagaggtacacaatgctaagactaaacctcgcgaggagcagtacgcctcgacctatcgtgtcgtgagcgttctgaccgtccttcaccaagattggcttaacggcaaagaatataagtgcaaggtaagcaataaagcacttccggccccaatcgagaaaaccatttccaaggccaaaggtcaaccaagagaaccccaggtgtatactcttccgccttctcgtgaggaaatgactaaaaatcaagtatcccttacgtgtctggttaaaggtttttatcctagcgatattgctgttgaatgggaatcgaacggtcagccggagaataattataaaacaacgccacccgtcctggatagcgacggctcattttttctgtatagcaaactgactgtagataaatcacggtggcagcagggcaatgtattcagttgctccgttatgcatgaagcgttacataatcactacacgcagaaatctcttagtctttcacccggt

SEQ ID NO: 551 - DNA, 1359 bp, Synthetic construct
  source 1..1359: mol_type = other DNA
caggtacagctgcagcagtcgggtccaggactggtgaagccctcgcagaccctctcactcacctgtgccatctccggggacagtgtctctagcaacagtgctgcttggaactggatcaggcagtccccatcgagaggccttgagtggctgggaaggacatactacaggtccaagtggtttaatgattatgcactatctgtgaaaagtcgaataaccatcaacccagacacatccaagaaccagttctccctgcacctgaactctgtgactcccgaggacacggctgtgtattactgtgcaagagaacctggtatagtagcacctggcccttttgactactggggccagggaaccctggtcaccgtctcctcagctagcactaaagggccttctgtatttcccttggccccgtccagcaaatcgacctcgggagggacagccgccctgggttgccttgtgaaagattatttccctgagccagttaccgtaagttggaacagtggggcgctgacaagtggtgtgcacacgtttcctgccgtcctgcaatcatcgggcttgtatagcctcagctctgtggtcactgtcccaagttcatcgctgggcactcagacgtatatttgcaatgtgaaccacaaaccttcaaatacaaaagtggataaacgcgtagaaccgaaatcgtgtgataaaactcacacatgcccgccatgcccggcacctgaactgcttggtggtcccagcgtgttcctgttcccgccgaagcctaaagatactctaatgatcagccgtacgccagaggtgacatgtgtcgtggttgacgtgtcccacgaagatcccgaagttaagttcaattggtatgttgatggtgtagaggtacacaatgctaagactaaacctcgcgaggagcagtacgcctcgacctatcgtgtcgtgagcgttctgaccgtccttcaccaagattggcttaacggcaaagaatataagtgcaaggtaagcaataaagcacttccggccccaatcgagaaaaccatttccaaggccaaaggtcaaccaagagaaccccaggtgtatactcttccgccttctcgtgaggaaatgactaaaaatcaagtatcccttacgtgtctggttaaaggtttttatcctagcgatattgctgttgaatgggaatcgaacggtcagccggagaataattataaaacaacgccacccgtcctggatagcgacggctcattttttctgtatagcaaactgactgtagataaatcacggtggcagcagggcaatgtattcagttgctccgttatgcatgaagcgttacataatcactacacgcagaaatctcttagtctttcacccggt

SEQ ID NO: 552 - DNA, 1359 bp, Synthetic construct
  source 1..1359: mol_type = other DNA
caggtacagctgcagcagtcaggtccaggactggtgaagcccacgcagaccctctcactcacctgtgccatctccggggacagtgtctctagcaacagtgctgcatggaactggatcaggcagtccccatcgagaggccttgagtggctggggaggacatactacaggtccaagtggtttaatggttatgcagtatctgtgaaaagtcgaataaccatcaaccccgacgcatccaagaaccagttctccctgcacttgaagtctgtgactgacgaggacacggctgtatattactgtgcaacagatcggggggaactcctccactggtacttcgatctctggggccgtggcaccctggtcaccgtctcttcagctagcactaaagggccttctgtatttcccttggccccgtccagcaaatcgacctcgggagggacagccgccctgggttgccttgtgaaagattatttccctgagccagttaccgtaagttggaacagtggggcgctgacaagtggtgtgcacacgtttcctgccgtcctgcaatcatcgggcttgtatagcctcagctctgtggtcactgtcccaagttcatcgctgggcactcagacgtatatttgcaatgtgaaccacaaaccttcaaatacaaaagtggataaacgcgtagaaccgaaatcgtgtgataaaactcacacatgcccgccatgcccggcacctgaactgcttggtggtcccagcgtgttcctgttcccgccgaagcctaaagatactctaatgatcagccgtacgccagaggtgacatgtgtcgtggttgacgtgtcccacgaagatcccgaagttaagttcaattggtatgttgatggtgtagaggtacacaatgctaagactaaacctcgcgaggagcagtacgcctcgacctatcgtgtcgtgagcgttctgaccgtccttcaccaagattggcttaacggcaaagaatataagtgcaaggtaagcaataaagcacttccggccccaatcgagaaaaccatttccaaggccaaaggtcaaccaagagaaccccaggtgtatactcttccgccttctcgtgaggaaatgactaaaaatcaagtatcccttacgtgtctggttaaaggtttttatcctagcgatattgctgttgaatgggaatcgaacggtcagccggagaataattataaaacaacgccacccgtcctggatagcgacggctcattttttctgtatagcaaactgactgtagataaatcacggtggcagcagggcaatgtattcagttgctccgttatgcatgaagcgttacataatcactacacgcagaaatctcttagtctttcacccggt

SEQ ID NO: 553 - DNA, 1359 bp, Synthetic construct
  source 1..1359: mol_type = other DNA
caggtacagctgcagcagtcaggtccaggactggtgaagtcctcgcagaccctctcaatcacctgtgccatctccggggacagtgtctctagcaacagtgctgcttggaactggatcaggcagtccccatcgagaggccttgagtggctgggaaggacatactacaggtccaagtggtataatgattatgcactatctgtgaaaagtcgaataatcatcaagtcagacacatccaagaaccagttctccctgcagttgaactctgtgactcccgaggacacggctgtgtactactgtgcaagagaaccgggtatagcagcacctggtccatttgactactggggccagggatccctggtcaccgtctcctcagctagcactaaagggccttctgtatttcccttggccccgtccagcaaatcgacctcgggagggacagccgccctgggttgccttgtgaaagattatttccctgagccagttaccgtaagttggaacagtggggcgctgacaagtggtgtgcacacgtttcctgccgtcctgcaatcatcgggcttgtatagcctcagctctgtggtcactgtcccaagttcatcgctgggcactcagacgtatatttgcaatgtgaaccacaaaccttcaaatacaaaagtggataaacgcgtagaaccgaaatcgtgtgataaaactcacacatgcccgccatgcccggcacctgaactgcttggtggtcccagcgtgttcctgttcccgccgaagcctaaagatactctaatgatcagccgtacgccagaggtgacatgtgtcgtggttgacgtgtcccacgaagatcccgaagttaagttcaattggtatgttgatggtgtagaggtacacaatgctaagactaaacctcgcgaggagcagtacgcctcgacctatcgtgtcgtgagcgttctgaccgtccttcaccaagattggcttaacggcaaagaatataagtgcaaggtaagcaataaagcacttccggccccaatcgagaaaaccatttccaaggccaaaggtcaaccaagagaaccccaggtgtatactcttccgccttctcgtgaggaaatgactaaaaatcaagtatcccttacgtgtctggttaaaggtttttatcctagcgatattgctgttgaatgggaatcgaacggtcagccggagaataattataaaacaacgccacccgtcctggatagcgacggctcattttttctgtatagcaaactgactgtagataaatcacggtggcagcagggcaatgtattcagttgctccgttatgcatgaagcgttacataatcactacacgcagaaatctcttagtctttcacccggt

SEQ ID NO: 554 - protein, 214 aa, Synthetic construct
DIQMTQSPSSVSTSVGDRVTITCRASQGISSWLAWYQQKPGKAPKLLISAASSLQSGVPSRFSGSGSGTDFTLTISTLQPEDFASYYCQQANSFPPTFGQGTRVEIKRTVAAPSVFIFPPSDEQLKSGTASVVCLLNNFYPREAKVQWKVDNALQSGNSQESVTEQDSKDSTYSLSSTLTLSKADYEKHKVYACEVTHQGLSSPVTKSFNRGEC

SEQ ID NO: 555 - protein, 214 aa, Synthetic construct
DIQMTQSPSSLSASVGDRVTITCRASQGISSWLTWYQQKPGKAPKLLIYAASSLQGGVPSRFSGSGSGTDFTLTISSLQPEDFATYYCQQANSFPPTFGQGTKVEIKRTVAAPSVFIFPPSDEQLKSGTASVVCLLNNFYPREAKVQWKVDNALQSGNSQESVTEQDSKDSTYSLSSTLTLSKADYEKHKVYACEVTHQGLSSPVTKSFNRGEC

SEQ ID NO: 556 - protein, 214 aa, Synthetic construct
DIQMTQSPSSVSASIGDRVTITCRASKGISIWLAWYQQKPGKAPKVLISAASSLQSGAPSRFSGSGSGTDFTLTISSLQPEDFATYYCQQANSFPPTFGQGTKVEIKRTVAAPSVFIFPPSDEQLKSGTASVVCLLNNFYPREAKVQWKVDNALQSGNSQESVTEQDSKDSTYSLSSTLTLSKADYEKHKVYACEVTHQGLSSPVTKSFNRGEC

SEQ ID NO: 557 - protein, 215 aa, Synthetic construct
EIVLTQSPGTLSLSPGDRATLSCRASQSVRNSYVAWYQQKPGQAPRLLIYGASSRATGIPDRFSGSGSGTDFSLTIGRLEPEDFVVYYCQQYGNSPLTFGGGTKVEIKRTVAAPSVFIFPPSDEQLKSGTASVVCLLNNFYPREAKVQWKVDNALQSGNSQESVTEQDSKDSTYSLSSTLTLSKADYEKHKVYACEVTHQGLSSPVTKSFNRGEC

SEQ ID NO: 558 - protein, 220 aa, Synthetic construct
DIVMTQSPDSLAVSLGERATINCKSSQSVLYSSNNKNYLAWYQQKPGQPPKLLIYWASPRESGVPDRFSGSGSGTDFTLTISSLQAEDVAVYYCQQYYSIPRTFGQGTKVEIKRTVAAPSVFIFPPSDEQLKSGTASVVCLLNNFYPREAKVQWKVDNALQSGNSQESVTEQDSKDSTYSLSSTLTLSKADYEKHKVYACEVTHQGLSSPVTKSFNRGEC

SEQ ID NO: 559 - protein, 214 aa, Synthetic construct
DIQMTQSPSSVSASVGDRVTITCRASQGISSWLAWYQQKPGKAPKVLIYAASSLQSGVPSRFSGSGSGTDFTLTISSLQPEDFATYYCQQANSFPPTFGPGTKVDIKRTVAAPSVFIFPPSDEQLKSGTASVVCLLNNFYPREAKVQWKVDNALQSGNSQESVTEQDSKDSTYSLSSTLTLSKADYEKHKVYACEVTHQGLSSPVTKSFNRGEC

SEQ ID NO: 560 - protein, 214 aa, Synthetic construct
DIQMTQSPSSVSASVGDRVTITCRASQGVNNWLAWYQQKPGKAPKLLIHAASSLLSGVPSRFSGSGSGTDFTLTITSLQPEDFATYYCQQANSFPITFGQGTRLEIKRTVAAPSVFIFPPSDEQLKSGTASVVCLLNNFYPREAKVQWKVDNALQSGNSQESVTEQDSKDSTYSLSSTLTLSKADYEKHKVYACEVTHQGLSSPVTKSFNRGEC

SEQ ID NO: 561 - protein, 220 aa, Synthetic construct
DIVMTQSPDSLAVSLGERATINCKSSQSVLYSSNNKNYLAWYQQKPGQPPKLLIYWASTRESGVPDRFSGSGSGTDFTLTISSLQAEDVAVYYCQQYYSTPYTFGQGTKLEIKRTVAAPSVFIFPPSDEQLKSGTASVVCLLNNFYPREAKVQWKVDNALQSGNSQESVTEQDSKDSTYSLSSTLTLSKADYEKHKVYACEVTHQGLSSPVTKSFNRGEC

SEQ ID NO: 562 - protein, 220 aa, Synthetic construct
DIVMTQSPDSLAVSLGERATINCKSSQSVLYSSNNKNYLAWYQQKPGQPPKLLIYWASNRESGVPDRFSGSGSGTDFTLTISSLQAEDVAVYYCQQYYSTPYTFGQGTKLEIKRTVAAPSVFIFPPSDEQLKSGTASVVCLLNNFYPREAKVQWKVDNALQSGNSQESVTEQDSKDSTYSLSSTLTLSKADYEKHKVYACEVTHQGLSSPVTKSFNRGEC

SEQ ID NO: 563 - protein, 214 aa, Synthetic construct
EIVLTQSPGTLSLSPGERATLSCRASQSVSSSYLAWYQQKPGQSPRLLIYGASSRATGIPDRFSGSGSGTDFTLTISRLEPEDFAVYYCQQYGRSVTFGGGTKLEIKRTVAAPSVFIFPPSDEQLKSGTASVVCLLNNFYPREAKVQWKVDNALQSGNSQESVTEQDSKDSTYSLSSTLTLSKADYEKHKVYACEVTHQGLSSPVTKSFNRGEC

SEQ ID NO: 564 - protein, 220 aa, Synthetic construct; identical to SEQ ID NO: 561

SEQ ID NO: 565 - protein, 214 aa, Synthetic construct
EIVLTQSPDTLSLSPGERATLSCRASQTIRSSYLAWYQLKPGQAPRLLIYGASSRATGIPDRFSGSGSGTDFTLSISRLEPEDFAVYYCQQYGRSIIFGGGTKVEIKRTVAAPSVFIFPPSDEQLKSGTASVVCLLNNFYPREAKVQWKVDNALQSGNSQESVTEQDSKDSTYSLSSTLTLSKADYEKHKVYACEVTHQGLSSPVTKSFNRGEC

SEQ ID NO: 566 - protein, 214 aa, Synthetic construct
DIQMTQSPSSVSASVGDRVTITCRASQGISSWLAWYQQKPGKAPKLLIYAASSLQSGVPSRFSGSGSGTDFTLTISSLQPEDFATYYCQQNYRTPITFGQGTRLEIKRTVAAPSVFIFPPSDEQLKSGTASVVCLLNNFYPREAKVQWKVDNALQSGNSQESVTEQDSKDSTYSLSSTLTLSKADYEKHKVYACEVTHQGLSSPVTKSFNRGEC

SEQ ID NO: 567 - DNA, 642 bp, Synthetic construct
  source 1..642: mol_type = other DNA
gacatccagatgacccagtctccatcttccgtgtctacatctgttggagacagagtcaccatcacttgtcgggcgagtcagggtattagcagctggttagcctggtatcagcagaaaccagggaaagcccctaagctcctgatctctgctgcatccagtttgcaaagtggggtcccatcaaggttcagcggcagtggatctgggacagatttcactctcaccatcagcaccctgcagcctgaagactttgcatcttactattgtcaacaggctaacagtttccctccgacgttcggccaagggaccagggtggaaatcaaacgtacggtagctgccccttcagtttttatctttccgccgtctgacgagcagttaaaatccgggaccgcttctgtagtttgcctgctgaataatttttatccgcgtgaggctaaagtacaatggaaagtcgacaatgctttgcagtcgggaaattcacaggaaagtgttacggagcaggattctaaagattccacatattcactcagctccacccttacactgagcaaagccgactatgaaaaacataaagtttacgcatgtgaggtgacgcaccaaggattatccagtccggtcacaaaatcgtttaaccgcggtgagtgt

SEQ ID NO: 568 - DNA, 642 bp, Synthetic construct
  source 1..642: mol_type = other DNA
gacatccagatgacccagtctccatcttccctgtctgcatctgtcggagacagagtcaccatcacttgtcgggcgagtcagggtattagcagctggttaacctggtatcagcagaaaccagggaaagcccctaagctcctgatctatgctgcatccagtttgcaaggtggggtcccatcaagattcagcggcagtggatctgggacagatttcactctcaccatcagcagcctgcagcctgaagattttgcaacttactattgtcaacaggctaacagtttccctccgacgttcggccaagggaccaaggtggaaatcaaacgtacggtagctgccccttcagtttttatctttccgccgtctgacgagcagttaaaatccgggaccgcttctgtagtttgcctgctgaataatttttatccgcgtgaggctaaagtacaatggaaagtcgacaatgctttgcagtcgggaaattcacaggaaagtgttacggagcaggattctaaagattccacatattcactcagctccacccttacactgagcaaagccgactatgaaaaacataaagtttacgcatgtgaggtgacgcaccaaggattatccagtccggtcacaaaatcgtttaaccgcggtgagtgt

SEQ ID NO: 569 - DNA, 642 bp, Synthetic construct
  source 1..642: mol_type = other DNA
gacatccagatgacccagtctccatcttccgtgtctgcatctataggagacagagtcaccatcacttgtcgggcgagtaagggaattagcatctggttagcctggtatcagcagaaaccagggaaagcccctaaggtcctgatctctgctgcatccagtttgcaaagtggggccccatcaaggttcagcggcagtggatctgggacagatttcactctcaccatcagcagcctgcagcctgaagattttgcaacttactattgtcaacaggctaacagtttccctccgacgttcggccaagggaccaaggtggagatcaaacgtacggtagctgccccttcagtttttatctttccgccgtctgacgagcagttaaaatccgggaccgcttctgtagtttgcctgctgaataatttttatccgcgtgaggctaaagtacaatggaaagtcgacaatgctttgcagtcgggaaattcacaggaaagtgttacggagcaggattctaaagattccacatattcactcagctccacccttacactgagcaaagccgactatgaaaaacataaagtttacgcatgtgaggtgacgcaccaaggattatccagtccggtcacaaaatcgtttaaccgcggtgagtgt

SEQ ID NO: 570 - DNA, 645 bp, Synthetic construct
  source 1..645: mol_type = other DNA
gaaattgtgttgacgcagtctccaggcaccctgtctttgtctccaggggacagagccaccctctcatgcagggccagtcagagtgttaggaacagttacgtagcctggtaccagcagaaacctggccaggctcccaggctcctcatctatggtgcatccagcagggccactggcatcccagacaggttcagtggcagtgggtctgggacagacttcagtctcaccatcggcagactggagcctgaggattttgtagtgtattattgtcagcaatacggtaactcacctctcactttcggcggagggaccaaggtggagatcaaacgtacggtagctgccccttcagtttttatctttccgccgtctgacgagcagttaaaatccgggaccgcttctgtagtttgcctgctgaataatttttatccgcgtgaggctaaagtacaatggaaagtcgacaatgctttgcagtcgggaaattcacaggaaagtgttacggagcaggattctaaagattccacatattcactcagctccacccttacactgagcaaagccgactatgaaaaacataaagtttacgcatgtgaggtgacgcaccaaggattatccagtccggtcacaaaatcgtttaaccgcggtgagtgt

SEQ ID NO: 571 - DNA, 660 bp, Synthetic construct
  source 1..660: mol_type = other DNA
gacatcgtgatgacccagtctccagactccctggctgtgtctctgggcgagagggccaccatcaactgcaagtccagccagagtgttttatacagctccaacaataagaactacttagcttggtaccagcagaaacctggacagcctcctaagctgctcatttactgggcatctccccgggaatccggggtccctgaccggttcagtggcagcgggtctgggacagatttcactctcaccatcagcagcctgcaggctgaagatgtggcagtttattattgtcagcaatattatagtattcctcggacgttcggccaagggaccaaggtggaaatcaaacgtacggtagctgccccttcagtttttatctttccgccgtctgacgagcagttaaaatccgggaccgcttctgtagtttgcctgctgaataatttttatccgcgtgaggctaaagtacaatggaaagtcgacaatgctttgcagtcgggaaattcacaggaaagtgttacggagcaggattctaaagattccacatattcactcagctccacccttacactgagcaaagccgactatgaaaaacataaagtttacgcatgtgaggtgacgcaccaaggattatccagtccggtcacaaaatcgtttaaccgcggtgagtgt

SEQ ID NO: 572 - DNA, 642 bp, Synthetic construct
  source 1..642: mol_type = other DNA
gacatccagatgacccagtctccatcttccgtgtctgcatctgtaggagacagagtcaccatcacttgtcgggcgagtcagggtattagcagctggttagcctggtatcagcagaaaccagggaaagcccctaaggtcctgatctatgctgcatccagtttgcaaagtggggtcccatcaaggttcagcggcagtggatctgggacagatttcactctcaccatcagcagcctgcagcctgaagattttgcaacttactattgtcaacaggctaacagtttccctcccactttcggccctgggaccaaagtggatatcaaacgtacggtagctgccccttcagtttttatctttccgccgtctgacgagcagttaaaatccgggaccgcttctgtagtttgcctgctgaataatttttatccgcgtgaggctaaagtacaatggaaagtcgacaatgctttgcagtcgggaaattcacaggaaagtgttacggagcaggattctaaagattccacatattcactcagctccacccttacactgagcaaagccgactatgaaaaacataaagtttacgcatgtgaggtgacgcaccaaggattatccagtccggtcacaaaatcgtttaaccgcggtgagtgt

SEQ ID NO: 573 - DNA, 642 bp, Synthetic construct
  source 1..642: mol_type = other DNA
gacatccagatgactcagtctccatcttccgtgtctgcatctgtaggagacagagtcaccatcacttgtcgggcgagtcagggtgttaacaactggttagcctggtatcagcagaaaccagggaaagcccctaagctcctgatccatgctgcatccagtttgctaagtggggtcccatcaaggttcagcggcagtggatctgggacagatttcacgctcaccatcaccagcctgcagcctgaagattttgcaacttactattgtcaacaggctaacagtttccccatcaccttcggccaagggacacgactggaaattaaacgtacggtagctgccccttcagtttttatctttccgccgtctgacgagcagttaaaatccgggaccgcttctgtagtttgcctgctgaataatttttatccgcgtgaggctaaagtacaatggaaagtcgacaatgctttgcagtcgggaaattcacaggaaagtgttacggagcaggattctaaagattccacatattcactcagctccacccttacactgagcaaagccgactatgaaaaacataaagtttacgcatgtgaggtgacgcaccaaggattatccagtccggtcacaaaatcgtttaaccgcggtgagtgt

SEQ ID NO: 574 - DNA, 660 bp, Synthetic construct
  source 1..660: mol_type = other DNA
gacatcgtgatgacccagtctccagactccctggctgtgtctctgggcgagagggccaccatcaactgcaagtccagccagagtgttttatacagctccaacaataagaactacttagcttggtaccagcagaaaccaggacagcctcctaagctgctcatttactgggcatctacccgggaatccggggtccctgaccgattcagtggcagcgggtctgggacagatttcactctcaccatcagcagcctgcaggctgaagatgtggcagtttattactgtcagcaatattatagtactccgtacacttttggccaggggaccaagctggagatcaaacgtacggtagctgccccttcagtttttatctttccgccgtctgacgagcagttaaaatccgggaccgcttctgtagtttgcctgctgaataatttttatccgcgtgaggctaaagtacaatggaaagtcgacaatgctttgcagtcgggaaattcacaggaaagtgttacggagcaggattctaaagattccacatattcactcagctccacccttacactgagcaaagccgactatgaaaaacataaagtttacgcatgtgaggtgacgcaccaaggattatccagtccggtcacaaaatcgtttaaccgcggtgagtgt

SEQ ID NO: 575 - DNA, 660 bp, Synthetic construct
  source 1..660: mol_type = other DNA
gacatcgtgatgacccagtctccagactccctggctgtgtctctgggcgagagggccaccatcaactgcaagtccagccagagtgttttatacagctccaacaataagaactacttagcttggtaccagcagaaaccaggacagcctcctaagctgctcatttactgggcatctaaccgggaatccggggtccctgaccgattcagtggctccgggtctgggacagatttcactctcaccatcagcagcctgcaggctgaagatgtggcagtttattactgtcagcaatattatagtactccgtacacttttggccaggggaccaagctggagatcaaacgtacggtagctgccccttcagtttttatctttccgccgtctgacgagcagttaaaatccgggaccgcttctgtagtttgcctgctgaataatttttatccgcgtgaggctaaagtacaatggaaagtcgacaatgctttgcagtcgggaaattcacaggaaagtgttacggagcaggattctaaagattccacatattcactcagctccacccttacactgagcaaagccgactatgaaaaacataaagtttacgcatgtgaggtgacgcaccaaggattatccagtccggtcacaaaatcgtttaaccgcggtgagtgt

SEQ ID NO: 576 - DNA, 642 bp, Synthetic construct
  source 1..642: mol_type = other DNA
gaaattgtgttgacgcagtctccaggcaccctgtctttgtctccaggggagagagccaccctctcctgcagggccagtcagagtgttagcagcagctacttagcctggtaccagcagaaacctggccagtctcccaggctcctcatctatggtgcatccagcagggccactggcatcccagacaggttcagtggcagtgggtctgggacagacttcactctcaccatcagcagactggagcctgaggattttgcagtatattactgtcagcagtatggtaggtcagtcactttcggcggagggaccaagctggaaatcaaacgtacggtagctgccccttcagtttttatctttccgccgtctgacgagcagttaaaatccgggaccgcttctgtagtttgcctgctgaataatttttatccgcgtgaggctaaagtacaatggaaagtcgacaatgctttgcagtcgggaaattcacaggaaagtgttacggagcaggattctaaagattccacatattcactcagctccacccttacactgagcaaagccgactatgaaaaacataaagtttacgcatgtgaggtgacgcaccaaggattatccagtccggtcacaaaatcgtttaaccgcggtgagtgt

SEQ ID NO: 577 - DNA, 660 bp, Synthetic construct
  source 1..660: mol_type = other DNA
gacatcgtgatgacccagtctccagactccctggctgtgtctctgggcgagagggccaccatcaactgcaagtccagccagagtgttttatacagctccaacaataagaactacttagcttggtaccagcagaaaccaggacagcctcctaagctgctcatttactgggcatctacccgggaatccggggtccctgaccgattcagtggcagcgggtctgggacagatttcactctcaccatcagcagcctgcaggctgaagatgtggcagtttattactgtcagcaatattatagtactccgtacacttttggccaggggaccaagctggaaatcaaacgtacggtagctgccccttcagtttttatctttccgccgtctgacgagcagttaaaatccgggaccgcttctgtagtttgcctgctgaataatttttatccgcgtgaggctaaagtacaatggaaagtcgacaatgctttgcagtcgggaaattcacaggaaagtgttacggagcaggattctaaagattccacatattcactcagctccacccttacactgagcaaagccgactatgaaaaacataaagtttacgcatgtgaggtgacgcaccaaggattatccagtccggtcacaaaatcgtttaaccgcggtgagtgt

SEQ ID NO: 578 - DNA, 642 bp, Synthetic construct
  source 1..642: mol_type = other DNA
gaaatagtgctgactcagtctccagacaccctatctttgtctccaggggaaagagccaccctctcctgcagggccagtcagactattaggagcagctacttagcctggtaccagctgaaacctggccaggctcccaggctcctcatctatggtgcatccagcagggccactggcatcccagacaggttcagtggcagtgggtctgggacagacttcactctctccatcagcagactggagcctgaagattttgcagtgtattactgtcaacagtatggccgctcaatcattttcggcggagggaccaaagtggaaatcaaacgtacggtagctgccccttcagtttttatctttccgccgtctgacgagcagttaaaatccgggaccgcttctgtagtttgcctgctgaataatttttatccgcgtgaggctaaagtacaatggaaagtcgacaatgctttgcagtcgggaaattcacaggaaagtgttacggagcaggattctaaagattccacatattcactcagctccacccttacactgagcaaagccgactatgaaaaacataaagtttacgcatgtgaggtgacgcaccaaggattatccagtccggtcacaaaatcgtttaaccgcggtgagtgt

SEQ ID NO: 579 - DNA, 642 bp, Synthetic construct
  source 1..642: mol_type = other DNA
gacatccagatgacccagtctccatcttccgtgtctgcatctgtaggagacagagtcaccatcacttgtcgggcgagtcagggtattagcagctggttagcctggtatcagcagaaaccagggaaagcccctaagctcctgatctatgctgcatccagtttgcaaagtggggtcccatcaaggttcagcggcagtggatctgggacagatttcactctcaccatcagcagcctgcagcctgaagattttgcaacttactactgtcaacagaattacagaaccccgatcaccttcggccaagggacacgactggagattaaacgtacggtagctgccccttcagtttttatctttccgccgtctgacgagcagttaaaatccgggaccgcttctgtagtttgcctgctgaataatttttatccgcgtgaggctaaagtacaatggaaagtcgacaatgctttgcagtcgggaaattcacaggaaagtgttacggagcaggattctaaagattccacatattcactcagctccacccttacactgagcaaagccgactatgaaaaacataaagtttacgcatgtgaggtgacgcaccaaggattatccagtccggtcacaaaatcgtttaaccgcggtgagtgt

SEQ ID NO: 580 - protein, 331 aa, Homo sapiens
MLLLINVILTLWVSCANGQEVKPCDFPEIQHGGLYYKSLRRLYFPAAAGQSYSYYCDQNFVTPSGSYWDYIHCTQDGWSPTVPCLRTCSKSDIEIENGFISESSSIYILNKEIQYKCKPGYATADGNSSGSITCLQNGWSAQPICIKFCDMPVFENSRAKSNGMRFKLHDTLDYECYDGYEISYGNTTGSIVCGEDGWSHFPTCYNSSEKCGPPPPISNGDTTSFLLKVYVPQSRVEYQCQSYYELQGSNYVTCSNGEWSEPPRCIHPCIITEENMNKNNIQLKGKSDIKYYAKTGDTIEFMCKLGYNANTSVLSFQAVCREGIVEYPRCE

SEQ ID NO: 581 - protein, 482 aa, Homo sapiens
MYRMQLLSCIALSLALVTNSEDCNELPPRRNTEILTGSWSDQTYPEGTQAIYKCRPGYRSLGNVIMVCRKGEWVALNPLRKCQKRPCGHPGDTPFGTFTLTGGNVFEYGVKAVYTCNEGYQLLGEINYRECDTDGWTNDIPICEVVKCLPVTAPENGKIVSSAMEPDREYHFGQAVRFVCNSGYKIEGDEEMHCSDDGFWSKEKPKCVEISCKSPDVINGSPISQKIIYKENERFQYKCNMGYEYSERGDAVCTESGWRPLPSCEEKSCDNPYIPNGDYSPLRIKHRTGDEITYQCRNGFYPATRGNTAKCTSTGWIPAPRCTLKPCDYPDIKHGGLYHENMRRPYFPVAVGKYYSYYCDEHFETPSGSYWDHIHCTQDGWSPAVPCLRKCYFPYLENGYNQNHGRKFVQGKSIDVACHPGYALPKAQTTVTCMENGWSPTPRCIRVSFTLGGGGSGLNDIFEAQKIEWHEGGGGSHHHHHH

SEQ ID NO: 582 - skipped

SEQ ID NO: 583 - protein, 5 aa, Synthetic construct
GYYLH

SEQ ID NO: 584 - protein, 5 aa, Synthetic construct
GYYMH

SEQ ID NO: 585 - protein, 5 aa, Synthetic construct
GYYMH

SEQ ID NO: 586 - protein, 5 aa, Synthetic construct
SYAMN

SEQ ID NO: 587 - protein, 5 aa, Synthetic construct
SYGIS

SEQ ID NO: 588 - protein, 5 aa, Synthetic construct
SYWIG

SEQ ID NO: 589 - protein, 5 aa, Synthetic construct
GYGIS

SEQ ID NO: 590 - protein, 5 aa, Synthetic construct
NYWIG

SEQ ID NO: 591 - protein, 5 aa, Synthetic construct
DYYMH

SEQ ID NO: 592 - protein, 5 aa, Synthetic construct
DYYMH

SEQ ID NO: 593 - protein, 5 aa, Synthetic construct
NYGIS

SEQ ID NO: 594 - protein, 5 aa, Synthetic construct
TYGIS

SEQ ID NO: 595 - protein, 5 aa, Synthetic construct
GYYMN

SEQ ID NO: 596 - protein, 5 aa, Synthetic construct
NYAVN

SEQ ID NO: 597 - protein, 5 aa, Synthetic construct
GYYLH

SEQ ID NO: 598 - protein, 5 aa, Synthetic construct
SYTMN

SEQ ID NO: 599 - protein, 5 aa, Synthetic construct
AYAIH

SEQ ID NO: 600 - protein, 5 aa, Synthetic construct
SYTMN

SEQ ID NO: 601 - skipped

SEQ ID NO: 602 - protein, 17 aa, Synthetic construct
WINPNSGDTNYVQNFQG

SEQ ID NO: 603 - protein, 16 aa, Synthetic construct
WINPNSGGTYAQKFQG

SEQ ID NO: 604 - protein, 17 aa, Synthetic construct
WINPNSGGTTYAQKFQG

SEQ ID NO: 605 - protein, 17 aa, Synthetic construct
WINTNTGTPTYAQGFTG

SEQ ID NO: 606 - protein, 17 aa, Synthetic construct
WISAYNGNTHYAQNLQG

SEQ ID NO: 607 - protein, 17 aa, Synthetic construct
IIYPGDSDTRYSPSFQG

SEQ ID NO: 608 - protein, 17 aa, Synthetic construct
WISAYNGNTHYAQNLQG

SEQ ID NO: 609 - protein, 17 aa, Synthetic construct
IIYPGDSDTIYSPSFQG

SEQ ID NO: 610 - protein, 17 aa, Synthetic construct
WINPNSGVTYYAQKFQG

SEQ ID NO: 611 - protein, 17 aa, Synthetic construct
WINPNNGGTDYAQKFQG

SEQ ID NO: 612 - protein, 17 aa, Synthetic construct
WISAYNGNTHYAQKLQG

SEQ ID NO: 613 - protein, 17 aa, Synthetic construct
WISAYSGNTNYAQKLQG

SEQ ID NO: 614 - protein, 17 aa, Synthetic construct
WINPNSGATNYAQKFQG

SEQ ID NO: 615 - protein, 17 aa, Synthetic construct
WINTNTGHPTYAQGFTG

SEQ ID NO: 616 - protein, 17 aa, Synthetic construct
WINPHSGGTIYAQKFQD

SEQ ID NO: 617 - protein, 17 aa, Synthetic construct
WINTATGTPTYAQGFTG

SEQ ID NO: 618 - protein, 17 aa, Synthetic construct
VISYDGSNKKYADSVKG

SEQ ID NO: 619 - protein, 17 aa, Synthetic construct
WINTNTGTPTYAQGFTG

SEQ ID NO: 620 - protein, 12 aa, Synthetic construct
SYVDTSSSAFDI

SEQ ID NO: 621 - protein, 12 aa, Synthetic construct
ERGDYDGDAFDI

SEQ ID NO: 622 - protein, 11 aa, Synthetic construct
EAGGSGEYFQH

SEQ ID NO: 623 - protein, 7 aa, Synthetic construct
HSTSFDY

SEQ ID NO: 624 - protein, 7 aa, Synthetic construct
SIAALDF

SEQ ID NO: 625 - protein, 12 aa, Synthetic construct
HDYFDIGGYFDY

SEQ ID NO: 626 - protein, 7 aa, Synthetic construct
AGLGIDY

SEQ ID NO: 627 - protein, 13 aa, Synthetic construct
GRGYSGYEGAFDI

SEQ ID NO: 628 - protein, 8 aa, Synthetic construct
DRTFYFDY

SEQ ID NO: 629 - protein, 17 aa, Synthetic construct
GVYDVVVPTAIVNWFDP

SEQ ID NO: 630 - protein, 7 aa, Synthetic construct
AAAAVDY

SEQ ID NO: 631 - protein, 10 aa, Synthetic construct
ERVSNWVFDF

SEQ ID NO: 632 - protein, 14 aa, Synthetic construct
DGAKWNHEGYYFDY

SEQ ID NO: 633 - protein, 7 aa, Synthetic construct
DSSSWGY

SEQ ID NO: 634 - protein, 13 aa, Synthetic construct
WNSGDSYYYYMDV

SEQ ID NO: 635 - protein, 9 aa, Synthetic construct
YSGSHSFDY

SEQ ID NO: 636 - protein, 6 aa, Synthetic construct
GLPFDY

SEQ ID NO: 637 - protein, 9 aa, Synthetic construct
YTGNYSFDY

SEQ ID NO: 638 - skipped

SEQ ID NO: 639 - protein, 5 aa, Synthetic construct
DYAMH

SEQ ID NO: 640 - protein, 5 aa, Synthetic construct
NAWMS

SEQ ID NO: 641 - protein, 5 aa, Synthetic construct
SYWMH

SEQ ID NO: 642 - protein, 5 aa, Synthetic construct
NYYMN

SEQ ID NO: 643 - protein, 5 aa, Synthetic construct
SYSMN

SEQ ID NO: 644 - protein, 5 aa, Synthetic construct
SYCMN

SEQ ID NO: 645 - protein, 5 aa, Synthetic construct
SYWMH

SEQ ID NO: 646 - protein, 5 aa, Synthetic construct
AYDMH

SEQ ID NO: 647 - protein, 5 aa, Synthetic construct
SYGMN

SEQ ID NO: 648 - protein, 5 aa, Synthetic construct
SYAMH

SEQ ID NO: 649 - protein, 5 aa, Synthetic construct
SYAMH

SEQ ID NO: 650 - protein, 5 aa, Synthetic construct
SYAMS

SEQ ID NO: 651 - skipped

SEQ ID NO: 652 - protein, 17 aa, Synthetic construct
GISWNSGSIAYADSVKG

SEQ ID NO: 653 - protein, 19 aa, Synthetic construct
RIKSKTDGGTTDYAAPVKG

SEQ ID NO: 654 - protein, 17 aa, Synthetic construct
RINSDGSSTSYADSVQG

SEQ ID NO: 655 - protein, 17 aa, Synthetic construct
NIKQDGSEKYYVDSVKG

SEQ ID NO: 656 - protein, 17 aa, Synthetic construct
SISSSSSYIYYADSVKG

SEQ ID NO: 657 - protein, 17 aa, Synthetic construct
SINSDSSYIYYADSVKG

SEQ ID NO: 658 - protein, 17 aa, Synthetic construct
HINSDGSSTNYADSVKG

SEQ ID NO: 659 - protein, 16 aa, Synthetic construct
TIGTAGDTYYPDSVKG

SEQ ID NO: 660 - protein, 17 aa, Synthetic construct
SISGYGSYIYYAASVKG

SEQ ID NO: 661 - protein, 17 aa, Synthetic construct
VISYDGSNKYYADSVKG

SEQ ID NO: 662 - protein, 17 aa, Synthetic construct
VISYDGSNKYYADSVKG

SEQ ID NO: 663 - protein, 17 aa, Synthetic construct
AISGSGDSTYFADSVKG

SEQ ID NO: 664 - protein, 12 aa, Synthetic construct
VAAAAGIPFFDY

SEQ ID NO: 665 - protein, 8 aa, Synthetic construct
RYNSDFDY

SEQ ID NO: 666 - protein, 8 aa, Synthetic construct
GQHLVQDY

SEQ ID NO: 667 - protein, 11 aa, Synthetic construct
DGYYNFDAFDI

SEQ ID NO: 668 - protein, 12 aa, Synthetic construct
EGYDNWNSACDI

SEQ ID NO: 669 - protein, 12 aa, Synthetic construct
EGYYNWNGGNDY

SEQ ID NO: 670 - protein, 11 aa, Synthetic construct
EGYWNGDTFDI

SEQ ID NO: 671 - protein, 13 aa, Synthetic construct
GGSSSWYDWYFDL

SEQ ID NO: 672 - protein, 14 aa, Synthetic construct
ELGGIYYGVGYFDL

SEQ ID NO: 673 - protein, 11 aa, Synthetic construct
RGGYSYGPFEH

SEQ ID NO: 674 - protein, 11 aa, Synthetic construct
RGNWNYGPFHY

SEQ ID NO: 675 - protein, 16 aa, Synthetic construct
ILGYCSGTSCYGLFDN

SEQ ID NO: 676 - skipped

SEQ ID NO: 677 - protein, 6 aa, Synthetic construct
INNWWS

SEQ ID NO: 678 - protein, 6 aa, Synthetic construct
SNNWWS

SEQ ID NO: 679 - protein, 6 aa, Synthetic construct
RDNWWS

SEQ ID NO: 680 - protein, 6 aa, Synthetic construct
SNNWWS

SEQ ID NO: 681 - protein, 6 aa, Synthetic construct
NDNWWS

SEQ ID NO: 682 - protein, 6 aa, Synthetic construct
NDNWWS

SEQ ID NO: 683 - protein, 6 aa, Synthetic construct
SNSWWN

SEQ ID NO: 684 - protein, 6 aa, Synthetic construct
KDNWWT

SEQ ID NO: 685 - protein, 6 aa, Synthetic construct
SDNWWN

SEQ ID NO: 686 - protein, 6 aa, Synthetic construct
NDNWWS

SEQ ID NO: 687 - protein, 6 aa, Synthetic construct
NDNWWN

SEQ ID NO: 688 - protein, 6 aa, Synthetic construct
SSNWWS

SEQ ID NO: 689 - protein, 6 aa, Synthetic construct
NDNWWS

SEQ ID NO: 690 - protein, 6 aa, Synthetic construct
NDNWWS

SEQ ID NO: 691 - protein, 6 aa, Synthetic construct
SSTWWS

SEQ ID NO: 692 - protein, 6 aa, Synthetic construct
SNNWWS

SEQ ID NO: 693 - protein, 6 aa, Synthetic construct
SSDWWS

SEQ ID NO: 694 - protein, 6 aa, Synthetic construct
SNNWWS

SEQ ID NO: 695 - protein, 6 aa, Synthetic construct
NDYWWN

SEQ ID NO: 696 - protein, 6 aa, Synthetic construct
SGHWWS

SEQ ID NO: 697 - protein, 6 aa, Synthetic construct
SSDWWS

SEQ ID NO: 698 - protein, 6 aa, Synthetic construct
SNNWWS

SEQ ID NO: 699 - protein, 6 aa, Synthetic construct
SDNWWS

SEQ ID NO: 700 - protein, 6 aa, Synthetic construct
SNNWWS

SEQ ID NO: 701 - protein, 6 aa, Synthetic construct
SDNWWN

SEQ ID NO: 702 - protein, 6 aa, Synthetic construct
SNNWWS

SEQ ID NO: 703 - protein, 6 aa, Synthetic construct
SDYWWS

SEQ ID NO: 704 - protein, 6 aa, Synthetic construct
NDNWWS

SEQ ID NO: 705 - protein, 16 aa, Synthetic construct
XIXXSXXXXXNPSLXS

SEQ ID NO: 706 - protein, 16 aa, Synthetic construct
KIYHSGNTDYNPSLKS

SEQ ID NO: 707 - protein, 16 aa, Synthetic construct
QIYHSGITNYNPSLKS

SEQ ID NO: 708 - protein, 16 aa, Synthetic construct
QIYQSGSTNYNPSLKS

SEQ ID NO: 709 - protein, 16 aa, Synthetic construct
QIYHSGHTNYNPSLKS

SEQ ID NO: 710 - protein, 16 aa, Synthetic construct
KIYHSEFTNYNPSLKS

SEQ ID NO: 711 - protein, 16 aa, Synthetic construct
KIYHSEFTNYNPSLKS

SEQ ID NO: 712 - protein, 16 aa, Synthetic construct
QIFHSGHTNYNPSLKS

SEQ ID NO: 713 - protein, 16 aa, Synthetic construct
KIYHSGSTNYNPSLKS

SEQ ID NO: 714 - protein, 16 aa, Synthetic construct
KIYHSGNTDYNPSLKS

SEQ ID NO: 715 - protein, 16 aa, Synthetic construct
KIYHSGFTNYNPSLKS

SEQ ID NO: 716 - protein, 16 aa, Synthetic construct
KIYHSGFTDYNPSLKS

SEQ ID NO: 717 - protein, 16 aa, Synthetic construct
RIYHSGHTNYNPSLKS

SEQ ID NO: 718 - protein, 16 aa, Synthetic construct
KIYHSEFTNYNPSLKS

SEQ ID NO: 719 - protein, 16 aa, Synthetic construct
KIYHSEFTNYNPSLKS

SEQ ID NO: 720 - protein, 16 aa, Synthetic construct
EIYHSGSTNYNPSLKS

SEQ ID NO: 721 - protein, 16 aa, Synthetic construct
QIYHSENTNYNPSLKS

SEQ ID NO: 722 - protein, 16 aa, Synthetic construct
EIYHSGSTNYNPSLKS

SEQ ID NO: 723 - protein, 16 aa, Synthetic construct
EIYHSGNINYNPSLKS

SEQ ID NO: 724 - protein, 16 aa, Synthetic construct
EIYHSGHTNYNPSLKS

SEQ ID NO: 725 - protein, 16 aa, Synthetic construct
EIYHSGNTNYNPSLKS

SEQ ID NO: 726 - protein, 16 aa, Synthetic construct
EIYHSRNTNYNPSLKS

SEQ ID NO: 727 - protein, 16 aa, Synthetic construct
RIYHSGTTNYNPSLES

SEQ ID NO: 728 - protein, 16 aa, Synthetic construct
EIYHSENTNYNPSLKS

SEQ ID NO: 729 - protein, 16 aa, Synthetic construct
DIYHSGNTNYNPSLKS

SEQ ID NO: 730 - protein, 16 aa, Synthetic construct
KIYHSGNTNYNPSLKS

SEQ ID NO: 731 - protein, 16 aa, Synthetic construct
KIYQSGSTMYNPSLKS

SEQ ID NO: 732 - protein, 16 aa, Synthetic construct
KIYHSGNTNHNPSLKS

SEQ ID NO: 733 - protein, 16 aa, Synthetic construct
KIYHSEFTNYNPSLRS

SEQ ID NO: 734 - protein, 13 aa, Synthetic construct
GSDYDFWSGYLDY

SEQ ID NO: 735 - protein, 12 aa, Synthetic construct
AQWELRAGWFDP

SEQ ID NO: 736 - protein, 12 aa, Synthetic construct
VYDWNYGGHFDY

SEQ ID NO: 737 - protein, 11 aa, Synthetic construct
GATEILGYFDL

SEQ ID NO: 738 - protein, 8 aa, Synthetic construct
EYHNFMDV

SEQ ID NO: 739 - protein, 8 aa, Synthetic construct
EYENFMDV

SEQ ID NO: 740 - protein, 13 aa, Synthetic construct
GGEYENSANWFDP

SEQ ID NO: 741 - protein, 13 aa, Synthetic construct
GGDIAMEGDWFAP

SEQ ID NO: 742 - protein, 11 aa, Synthetic construct
GGTETTGYMDV

SEQ ID NO: 743 - protein, 13 aa, Synthetic construct
GGDNFMEGEGLGT

SEQ ID NO: 744 - protein, 13 aa, Synthetic construct
GNHNYLWIGYLGT

SEQ ID NO: 745 - protein, 10 aa, Synthetic construct
GRDLTGYFDY

SEQ ID NO: 746 - protein, 12 aa, Synthetic construct
GVDFWSGSHMDV

SEQ ID NO: 747 - protein, 10 aa, Synthetic construct
EGLELPHMDV

SEQ ID NO: 748 - protein, 12 aa, Synthetic construct
SLYNWNDAAFDI

SEQ ID NO: 749 - protein, 12 aa, Synthetic construct
VDDWNYGGHFDY

SEQ ID NO: 750 - protein, 11 aa, Synthetic construct
GGHIGYYYMDV

SEQ ID NO: 751 - protein, 13 aa, Synthetic construct
GGEYGDPVGYFDL

SEQ ID NO: 752 - protein, 11 aa, Synthetic construct
GGTEITGYMDV

SEQ ID NO: 753 - protein, 12 aa, Synthetic construct
GHYGDYVVYFDY

SEQ ID NO: 754 - protein, 11 aa, Synthetic construct
GGVVADYYMDV

SEQ ID NO: 755 - protein, 13 aa, Synthetic construct
GEEWELRGGVFDI

SEQ ID NO: 756 - protein, 10 aa, Synthetic construct
GRELTGLFDY

SEQ ID NO: 757 - protein, 11 aa, Synthetic construct
GGIAVTAYFDY

SEQ ID NO: 758 - protein, 12 aa, Synthetic construct
GVDFWSGSHMDV

SEQ ID NO: 759 - protein, 11 aa, Synthetic construct
DKPPLLGAFDY

SEQ ID NO: 760 - protein, 10 aa, Synthetic construct
EGLELPHMDV

SEQ ID NO: 761 - protein, 8 aa, Synthetic construct
EYQNYMDV

SEQ ID NO: 762 - skipped

SEQ ID NO: 763 - protein, 5 aa, Synthetic construct
SYYWS

SEQ ID NO: 764 - protein, 5 aa, Synthetic construct
SYYWS

SEQ ID NO: 765 - protein, 5 aa, Synthetic construct
SYYWS

SEQ ID NO: 766 - protein, 5 aa, Synthetic construct
DYYLT

SEQ ID NO: 767 - protein, 5 aa, Synthetic construct
SYYWS

SEQ ID NO: 768 - protein, 5 aa, Synthetic construct
SYYWS

SEQ ID NO: 769 - protein, 5 aa, Synthetic construct
DYYWT

SEQ ID NO: 770 - protein, 16 aa, Synthetic construct
XXXXXGXTXYNPSLKS

SEQ ID NO: 771 - protein, 16 aa, Synthetic construct
YVYYSGYTKYNPSLKS

SEQ ID NO: 772 - protein, 16 aa, Synthetic construct
YIYYSGFTKYNPSLNS

SEQ ID NO: 773 - protein, 16 aa, Synthetic construct
YIYYSGFTKYNPSLKS

SEQ ID NO: 774 - protein, 16 aa, Synthetic construct
EINHSGSTNYNPSLKS

SEQ ID NO: 775 - protein, 16 aa, Synthetic construct
YVYYSGYTKYNPSLKS

SEQ ID NO: 776 - protein, 16 aa, Synthetic construct
YIYYSGFTKYNPSLKS

SEQ ID NO: 777 - protein, 16 aa, Synthetic construct
EVNHIGSTNYNPSLKS

SEQ ID NO: 778 - protein, 12 aa, Synthetic construct
VESKWNYGPFDI

SEQ ID NO: 779 - protein, 16 aa, Synthetic construct
REPRGRYNWNYGPFDI

SEQ ID NO: 780 - protein, 12 aa, Synthetic construct
HPRGYNYGPFDY

SEQ ID NO: 781 - protein, 11 aa, Synthetic construct
GSEDYYYYMDV

SEQ ID NO: 782 - protein, 12 aa, Synthetic construct
VESKWNYGPFAI

SEQ ID NO: 783 - protein, 12 aa, Synthetic construct
VDSKWNYGSFHI

SEQ ID NO: 784 - protein, 11 aa, Synthetic construct
YSTSWYGWFDP

SEQ ID NO: 785 - skipped

SEQ ID NO: 786 - protein, 7 aa, Synthetic construct
SGSYYWS

SEQ ID NO: 787 - protein, 7 aa, Synthetic construct
SGKYFWS

SEQ ID NO: 788 - protein, 7 aa, Synthetic construct
SGRYYWS

SEQ ID NO: 789 - protein, 7 aa, Synthetic construct
SGSYYWS

SEQ ID NO: 790 - protein, 7 aa, Synthetic construct
SGNYYWS

SEQ ID NO: 791 - protein, 7 aa, Synthetic construct
SGGYNWN

SEQ ID NO: 792 - protein, 7 aa, Synthetic construct
NNRYYWS

SEQ ID NO: 793 - protein, 16 aa, Synthetic construct
YIXXSGXTXYNPSLKX

SEQ ID NO: 794 - protein, 16 aa, Synthetic construct
YIYKSGFTNYNPSLKS

SEQ ID NO: 795 - protein, 16 aa, Synthetic construct
YIYYSGSTNYNPSLKN

SEQ ID NO: 796 - protein, 16 aa, Synthetic construct
YIYSSGYTNYNPSLKS

SEQ ID NO: 797 - protein, 16 aa, Synthetic construct
YIYYSGSTKYNPSLKS

SEQ ID NO: 798 - protein, 16 aa, Synthetic construct
YIYSSGSTNYNPSLKS

SEQ ID NO: 799 - protein, 16 aa, Synthetic construct
YINYSGNTYYNPSLKS

SEQ ID NO: 800 - protein, 16 aa, Synthetic construct
YIYYSGSTNYNPSLKS

SEQ ID NO: 801 - protein, 12 aa, Synthetic construct
GGRGYSYGPFDY

SEQ ID NO: 802 - protein, 12 aa, Synthetic construct
GGHNWNYAAFDI

SEQ ID NO: 803 - protein, 11 aa, Synthetic construct
SRGYRYGPFDY

SEQ ID NO: 804 - protein, 12 aa, Synthetic construct
DKGHWNYGAFDI

SEQ ID NO: 805 - protein, 12 aa, Synthetic construct
SPRGYSYGPFAY

SEQ ID NO: 806 - protein, 12 aa, Synthetic construct
GPLDTAMAPFDY

SEQ ID NO: 807 - protein, 15 aa, Synthetic construct
DRPSRYKWNYDAFAI

SEQ ID NO: 808 - protein, 7 aa, Synthetic construct
TSGVGVG

SEQ ID NO: 809 - protein, 7 aa, Synthetic construct
TSGVGVG

SEQ ID NO: 810 - protein, 7 aa, Synthetic construct
TSGVGVG

SEQ ID NO: 811 - protein, 16 aa, Synthetic construct
LIYWNXXXXYSPSLXS

SEQ ID NO: 812 - protein, 16 aa, Synthetic construct
LIYWNGDERYSPSLKS

SEQ ID NO: 813 - protein, 16 aa, Synthetic construct
LIYWNDVKFYSPSLQS

SEQ ID NO: 814 - protein, 11 aa, Synthetic construct
XXNWXYXAFDI

SEQ ID NO: 815 - protein, 11 aa, Synthetic construct
SPNWGYEAFDI

SEQ ID NO: 816 - protein, 11 aa, Synthetic construct
GDNWNYRAFDI

SEQ ID NO: 817 - skipped

SEQ ID NO: 818 - protein, 11 aa, Synthetic construct
RASQDVSTAVA

SEQ ID NO: 819 - protein, 11 aa, Synthetic construct
RASQNIITWLA

SEQ ID NO: 820 - protein, 11 aa, Synthetic construct
RASQNIITWLA

SEQ ID NO: 821 - protein, 11 aa, Synthetic construct
RASQNIITWLA

SEQ ID NO: 822 - protein, 11 aa, Synthetic construct
RASQNIITWLA

SEQ ID NO: 823 - protein, 11 aa, Synthetic construct
RASQNIITWLA

SEQ ID NO: 824 - protein, 11 aa, Synthetic construct
RASQNIITWLA

SEQ ID NO: 825 - protein, 11 aa, Synthetic construct
RASQNIITWLA

SEQ ID NO: 826 - protein, 11 aa, Synthetic construct
RASQNIITWLA

SEQ ID NO: 827 - protein, 11 aa, Synthetic construct
RASQNIITWLA

SEQ ID NO: 828 - protein, 11 aa, Synthetic construct
RASQNIITWLA

SEQ ID NO: 829 - protein, 11 aa, Synthetic construct
RASQNIITWLA

SEQ ID NO: 830 - protein, 11 aa, Synthetic construct
RASQTIRNFLN

SEQ ID NO: 831 - protein, 11 aa, Synthetic construct
RASQGIRNDLG

SEQ ID NO: 832 - protein, 11 aa, Synthetic construct
RASQSISRYLN

SEQ ID NO: 833 - protein, 11 aa, Synthetic construct
RASQGIRNDLG

SEQ ID NO: 834 - protein, 11 aa, Synthetic construct
RASQSISNYLN

SEQ ID NO: 835 - protein, 11 aa, Synthetic construct
RASQSIGSNLH

SEQ ID NO: 836 - protein, 11 aa, Synthetic construct
RASQGISSYLA

SEQ ID NO: 837 - protein, 11 aa, Synthetic construct
RASQSITSYLN

SEQ ID NO: 838 - protein, 11 aa, Synthetic construct
RASQGIRNDLG

SEQ ID NO: 839 - protein, 11 aa, Synthetic construct
RASQSISSYLN

SEQ ID NO: 840 - protein, 11 aa, Synthetic construct
RASQTIRSYLN

SEQ ID NO: 841 - protein, 11 aa, Synthetic construct
QASQDISNYLN

SEQ ID NO: 842 - protein, 11 aa, Synthetic construct
RASQDISNYLN

SEQ ID NO: 843 - protein, 11 aa, Synthetic construct
QASQDIKNCLN

SEQ ID NO: 844 - protein, 11 aa, Synthetic construct
RASQGISSWLA

SEQ ID NO: 845 - protein, 11 aa, Synthetic construct
RASQSISSYLN

SEQ ID NO: 846 - protein, 11 aa, Synthetic construct
RASQGISNYLA

SEQ ID NO: 847 - protein, 11 aa, Synthetic construct
RASQGISNYLA

SEQ ID NO: 848 - protein, 11 aa, Synthetic construct
RASQGISNYLA

SEQ ID NO: 849 - skipped

SEQ ID NO: 850 - protein, 7 aa, Synthetic construct
SASFLYS

SEQ ID NO: 851 - protein, 7 aa, Synthetic construct
KASSLES

SEQ ID NO: 852 - protein, 7 aa, Synthetic construct
KASSLES

SEQ ID NO: 853 - protein, 7 aa, Synthetic construct
KASSLES

SEQ ID NO: 854 - protein, 7 aa, Synthetic construct
KASSLES

SEQ ID NO: 855 - protein, 7 aa, Synthetic construct
KASSLES

SEQ ID NO: 856 - protein, 7 aa, Synthetic construct
KASSLES

SEQ ID NO: 857 - protein, 7 aa, Synthetic construct
KASSLES

SEQ ID NO: 858 - protein, 7 aa, Synthetic construct
KASSLES

SEQ ID NO: 859 - protein, 7 aa, Synthetic construct
KASSLES

SEQ ID NO: 860 - protein, 7 aa, Synthetic construct
KASSLES

SEQ ID NO: 861 - protein, 7 aa, Synthetic construct
KASSLES

SEQ ID NO: 862 - protein, 7 aa, Synthetic construct
AASSLQS

SEQ ID NO: 863 - protein, 7 aa, Synthetic construct
AASSLQS

SEQ ID NO: 864 - protein, 7 aa, Synthetic construct
AASSLQS

SEQ ID NO: 865 - protein, 7 aa, Synthetic construct
AASNLQS

SEQ ID NO: 866 - protein, 7 aa, Synthetic construct
AASSLQS

SEQ ID NO: 867 - protein, 7 aa, Synthetic construct
YASQSFS

SEQ ID NO: 868 - protein, 7 aa, Synthetic construct
TASTLQS

SEQ ID NO: 869 - protein, 7 aa, Synthetic construct
AASSLQS

SEQ ID NO: 870 - protein, 7 aa, Synthetic construct
AASSLQS

SEQ ID NO: 871 - protein, 7 aa, Synthetic construct
AASSFQS

SEQ ID NO: 872 - protein, 7 aa, Synthetic construct
AASSLQS

SEQ ID NO: 873 - protein, 7 aa, Synthetic construct
DASNLET

SEQ ID NO: 874 - protein, 7 aa, Synthetic construct
AASSLES

SEQ ID NO: 875 - protein, 7 aa, Synthetic construct
DASNLET

SEQ ID NO: 876 - protein, 7 aa, Synthetic construct
AASSLQS

SEQ ID NO: 877 - protein, 7 aa, Synthetic construct
AASSLQS

SEQ ID NO: 878 - protein, 7 aa, Synthetic construct
VASTLQS

SEQ ID NO: 879 - protein, 7 aa, Synthetic construct
AASTLQS

SEQ ID NO: 880 - protein, 7 aa, Synthetic construct
AASTLQS

SEQ ID NO: 881 - protein, 9 aa, Synthetic construct
QQSYATLPT

SEQ ID NO: 882 - protein, 9 aa, Synthetic construct
QQYSSYSYT

SEQ ID NO: 883 - protein, 9 aa, Synthetic construct
QQYSSYSYT

SEQ ID NO: 884 - protein, 9 aa, Synthetic construct
QQYSSYSYT

SEQ ID NO: 885 - protein, 9 aa, Synthetic construct
QQYSSYSYT

SEQ ID NO: 886 - protein, 9 aa, Synthetic construct
QQYSSYSYT

SEQ ID NO: 887 - protein, 9 aa, Synthetic construct
QQYSSYSYT

SEQ ID NO: 888 - protein, 9 aa, Synthetic construct
QQYSSYSYT

SEQ ID NO: 889 - protein, 9 aa, Synthetic construct
QQYSSYSYT

SEQ ID NO: 890 - protein, 9 aa, Synthetic construct
QQYSSYSYT

SEQ ID NO: 891 - protein, 9 aa, Synthetic construct
QQYSSYSYT

SEQ ID NO: 892 - protein, 9 aa, Synthetic construct
QQYSSYSYT

SEQ ID NO: 893 - protein, 9 aa, Synthetic construct
QQTYSIPIT

SEQ ID NO: 894 - protein, 9 aa, Synthetic construct
LQDYNYPWT

SEQ ID NO: 895 - protein, 9 aa, Synthetic construct
QQSYSSPIT

SEQ ID NO: 896 - protein, 9 aa, Synthetic construct
LQDYNWPWT

SEQ ID NO: 897 - protein, 9 aa, Synthetic construct
QQSYSSPLT

SEQ ID NO: 898 - protein, 9 aa, Synthetic construct
HQSSSLPRT

SEQ ID NO: 899 - protein, 9 aa, Synthetic construct
QQLNGYPPT

SEQ ID NO: 900 - protein, 9 aa, Synthetic construct
QQSYSTPLT

SEQ ID NO: 901 - protein, 9 aa, Synthetic construct
LQDYNWPYT

SEQ ID NO: 902 - protein, 9 aa, Synthetic construct
QQSYSNPYT

SEQ ID NO: 903 - protein, 9 aa, Synthetic construct
QQSYTTPLT

SEQ ID NO: 904 - protein, 9 aa, Synthetic construct
QQANSFPLT

SEQ ID NO: 905 - protein, 8 aa, Synthetic construct
QQSYSTPT

SEQ ID NO: 906 - protein, 9 aa, Synthetic construct
QQFDNLPLT

SEQ ID NO: 907 - protein, 9 aa, Synthetic construct
QQANSFPLT

SEQ ID NO: 908 - protein, 9 aa, Synthetic construct
QQSYSTPYT

SEQ ID NO: 909 - protein, 9 aa, Synthetic construct
QNYISAPLT

SEQ ID NO: 910 - protein, 9 aa, Synthetic construct
QKYISAPLT

SEQ ID NO: 911 - protein, 9 aa, Synthetic construct
QDYTSAPLT

SEQ ID NO: 912 - protein, 16 aa, Synthetic construct
RSSQXLLHXNGYNYLD

SEQ ID NO: 913 - protein, 16 aa, Synthetic construct
RSSQSLLHSNGYNYLD

SEQ ID NO: 914 - protein, 16 aa, Synthetic construct
RSSQILLHTNGYNYLD

SEQ ID NO: 915 - protein, 7 aa, Synthetic construct
LGSXRAS

SEQ ID NO: 916 - protein, 7 aa, Synthetic construct
LGSNRAS

SEQ ID NO: 917 - protein, 7 aa, Synthetic construct
LGSYRAS

SEQ ID NO: 918 - protein, 9 aa, Synthetic construct
MQXLQTPXT

SEQ ID NO: 919 - protein, 9 aa, Synthetic construct
MQTLQTPPT

SEQ ID NO: 920 - protein, 9 aa, Synthetic construct
MQALQTPLT

SEQ ID NO: 921 - protein, 11 aa, Synthetic construct
RASQSXXXXXX

SEQ ID NO: 922 - protein, 11 aa, Synthetic construct
RASQSVSSYLA

SEQ ID NO: 923 - protein, 12 aa, Synthetic construct
RASQSVRSSYFA

SEQ ID NO: 924 - protein, 12 aa, Synthetic construct
RASQSISSSYLA

SEQ ID NO: 925 - protein, 12 aa, Synthetic construct
RASQSVRSSYLA

SEQ ID NO: 926 - protein, 12 aa, Synthetic construct
RASQSVSSSYLA

SEQ ID NO: 927 - protein, 12 aa, Synthetic construct
RASQSVSSSYLA

SEQ ID NO: 928 - protein, 12 aa, Synthetic construct
RASQSVSDSYLA

SEQ ID NO: 929 - protein, 12 aa, Synthetic construct
RASQSVSRSYLA

SEQ ID NO: 930 - protein, 7 aa, Synthetic construct
XASXRAT

SEQ ID NO: 931 - protein, 7 aa, Synthetic construct
DASNRAT

SEQ ID NO: 932 - protein, 7 aa, Synthetic construct
GASSRAT

SEQ ID NO: 933 - protein, 7 aa, Synthetic construct
GASSRAT

SEQ ID NO: 934 - protein, 7 aa, Synthetic construct
GASSRAT

SEQ ID NO: 935 - protein, 7 aa, Synthetic construct
GASSRAT

SEQ ID NO: 936 - protein, 7 aa, Synthetic construct
GASSRAT

SEQ ID NO: 937 - protein, 7 aa, Synthetic construct
GASSRAT

SEQ ID NO: 938 - protein, 7 aa, Synthetic construct
GASSRAT

SEQ ID NO: 939 - protein, 9 aa, Synthetic construct
QQXXXXPXT

SEQ ID NO: 940 - protein, 9 aa, Synthetic construct
QQRSNWPLT

SEQ ID NO: 941 - protein, 9 aa, Synthetic construct
QQYGSSPRT

SEQ ID NO: 942 - protein, 9 aa, Synthetic construct
QQYGSSPIT

SEQ ID NO: 943 - protein, 9 aa, Synthetic construct
QQYGSSPYT

SEQ ID NO: 944 - protein, 9 aa, Synthetic construct
QQYGSSPFT

SEQ ID NO: 945 - protein, 9 aa, Synthetic construct
QQYGSSPYT

SEQ ID NO: 946 - protein, 9 aa, Synthetic construct
QQYDSSPFT

SEQ ID NO: 947 - protein, 9 aa, Synthetic construct
QQYGSSPWT

SEQ ID NO: 948 - protein, 17 aa, Synthetic construct
KSSQXXLYXSNXKNYLA

SEQ ID NO: 949 - protein, 17 aa, Synthetic construct
KSSQSVLYSSNNKNYLA

SEQ ID NO: 950 - protein, 17 aa, Synthetic construct
KSSQSVLYSSNNKNYLA

SEQ ID NO: 951 - protein, 17 aa, Synthetic construct
KSSQSVLYSSNNKNYLA

SEQ ID NO: 952 - protein, 17 aa, Synthetic construct
KSSQSVLYSSNNKNYLA

SEQ ID NO: 953 - protein, 17 aa, Synthetic construct
KSSQSVLYSSNNKNYLA

SEQ ID NO: 954 - protein, 17 aa, Synthetic construct
KSSQSVLYSSNNKNYLA

SEQ ID NO: 955 - protein, 17 aa, Synthetic construct
KSSQSVLYSSNNKNYLA

SEQ ID NO: 956 - protein, 17 aa, Synthetic construct
KSSQSVLYSSNNKNYLA

SEQ ID NO: 957 - protein, 17 aa, Synthetic construct
KSSQSVLYSSNNKNYLA

SEQ ID NO: 958 - protein, 17 aa, Synthetic construct
KSSQSVLYSSNNKNYLA

SEQ ID NO: 959 - protein, 17 aa, Synthetic construct
KSSQSVLYSSNNKNYLA

SEQ ID NO: 960 - protein, 17 aa, Synthetic construct
KSSQSVLYSSNNKNYLA

SEQ ID NO: 961 - protein, 17 aa, Synthetic construct
KSSQSVLYSSNNKNYLA

SEQ ID NO: 962 - protein, 17 aa, Synthetic construct
KSSQSVLYSSNNKNYLA

SEQ ID NO: 963 - protein, 17 aa, Synthetic construct
KSSQSVLYSSNNKNYLA

SEQ ID NO: 964 - protein, 17 aa, Synthetic construct
KSSQSVLYSSNNKNYLA

SEQ ID NO: 965 - protein, 17 aa, Synthetic construct
KSSQSVLYSSNNKNYLA

SEQ ID NO: 966 - protein, 17 aa, Synthetic construct
KSSQSVLYSSNNKNYLA

SEQ ID NO: 967 - protein, 17 aa, Synthetic construct
KSSQSVLYSSNNKNYLA

SEQ ID NO: 968 - protein, 17 aa, Synthetic construct
KSSQSVLYSSNNKNYLA

SEQ ID NO: 969 - protein, 17 aa, Synthetic construct
KSSQSVLYSSNNKNYLA

SEQ ID NO: 970 - protein, 17 aa, Synthetic construct
KSSQSVLYSSNNKNYLA

SEQ ID NO: 971 - protein, 17 aa, Synthetic construct
KSSQSVLYSSNNKNYLA

SEQ ID NO: 972 - protein, 17 aa, Synthetic construct
KSSQTVLYRSNNKNYLA

SEQ ID NO: 973 - protein, 17 aa, Synthetic construct
KSSQSVLYSSNNKNYLA

SEQ ID NO: 974 - protein, 17 aa, Synthetic construct
KSSQSVLYSSNNKNYLA

SEQ ID NO: 975 - protein, 17 aa, Synthetic construct
KSSQSVLYSSNNKNYLA

SEQ ID NO: 976 - protein, 17 aa, Synthetic construct
KSSQSVLYRSNNKNYLA

SEQ ID NO: 977 - protein, 17 aa, Synthetic construct
KSSQTILYRSNIKNYLA

SEQ ID NO: 978 - protein, 17 aa, Synthetic construct
KSSQSVLYSSNNKNYLA

SEQ ID NO: 979 - protein, 17 aa, Synthetic construct
KSSQSVLYSSNNKNYLA

SEQ ID NO: 980 - protein, 17 aa, Synthetic construct
KSSQSVLYSSNNKNYLA

SEQ ID NO: 981 - protein, 17 aa, Synthetic construct
KSSQSVLYSSNNKNYLA

SEQ ID NO: 982 - protein, 17 aa, Synthetic construct
KSSQSVLYSSNNKNYLA

SEQ ID NO: 983 - protein, 7 aa, Synthetic construct
WASXRES

SEQ ID NO: 984 - protein, 7 aa, Synthetic construct
WASNRES

SEQ ID NO: 985 - protein, 7 aa, Synthetic construct
WASNRES

SEQ ID NO: 986 - protein, 7 aa, Synthetic construct
WASNRES

SEQ ID NO: 987 - protein, 7 aa, Synthetic construct
WASNRES

SEQ ID NO: 988 - protein, 7 aa, Synthetic construct
WASNRES

SEQ ID NO: 989 - protein, 7 aa, Synthetic construct
WASNRES

SEQ ID NO: 990 - protein, 7 aa, Synthetic construct
WASNRES

SEQ ID NO: 991 - protein, 7 aa, Synthetic construct
WASNRES

SEQ ID NO: 992 - protein, 7 aa, Synthetic construct
WASNRES

SEQ ID NO: 993 - protein, 7 aa, Synthetic construct
WASNRES

SEQ ID NO: 994 - protein, 7 aa, Synthetic construct
WASNRES

SEQ ID NO: 995 - protein, 7 aa, Synthetic construct
WASNRES

SEQ ID NO: 996 - protein, 7 aa, Synthetic construct
WASNRES

SEQ ID NO: 997 - protein, 7 aa, Synthetic construct
WASNRES

SEQ ID NO: 998 - protein, 7 aa, Synthetic construct
WASNRES

SEQ ID NO: 999 - protein, 7 aa, Synthetic construct
WASNRES

SEQ ID NO: 1000 - protein, 7 aa, Synthetic construct
WASNRES

SEQ ID NO: 1001 - protein, 7 aa, Synthetic construct
WASNRES

SEQ ID NO: 1002 - protein, 7 aa, Synthetic construct
WASNRES

SEQ ID NO: 1003 - protein, 7 aa, Synthetic construct
WASNRES

SEQ ID NO: 1004 - protein, 7 aa, Synthetic construct
WASNRES

SEQ ID NO: 1005 - protein, 7 aa, Synthetic construct
WASNRES

SEQ ID NO: 1006 - protein, 7 aa, Synthetic construct
WASNRES

SEQ ID NO: 1007 - protein, 7 aa, Synthetic construct
WASTRES

SEQ ID NO: 1008 - protein, 7 aa, Synthetic construct
WASTRES

SEQ ID NO: 1009 - protein, 7 aa, Synthetic construct
WASTRES

SEQ ID NO: 1010 - protein, 7 aa, Synthetic construct
WASTRES

SEQ ID NO: 1011 - protein, 7 aa, Synthetic construct
WASTRES

SEQ ID NO: 1012 - protein, 7 aa, Synthetic construct
WASTRES

SEQ ID NO: 1013 - protein, 7 aa, Synthetic construct
WASTRES

SEQ ID NO: 1014 - protein, 7 aa, Synthetic construct
WASTRES

SEQ ID NO: 1015 - protein, 7 aa, Synthetic construct
WASTRES

SEQ ID NO: 1016 - protein, 7 aa, Synthetic construct
WASTRES

SEQ ID NO: 1017 - protein, 7 aa, Synthetic construct
WASTRES

SEQ ID NO: 1018 - skipped

SEQ ID NO: 1019 - protein, 9 aa, Synthetic construct
QQYYSTPYT

SEQ ID NO: 1020 - protein, 9 aa, Synthetic construct
QQYYSTPYT

SEQ ID NO: 1021 - protein, 9 aa, Synthetic construct
QQYYSTPYT

SEQ ID NO: 1022 - protein, 9 aa, Synthetic construct
QQYYSTPYT

SEQ ID NO: 1023 - protein, 9 aa, Synthetic construct
QQYYSTPYT

SEQ ID NO: 1024 - protein, 9 aa, Synthetic construct
QQYYSTPYT

SEQ ID NO: 1025 - protein, 9 aa, Synthetic construct
QQYYSTPYT

SEQ ID NO: 1026 - protein, 9 aa, Synthetic construct
QQYYSTPYT

SEQ ID NO: 1027 - protein, 9 aa, Synthetic construct
QQYYSTPYT

SEQ ID NO: 1028 - protein, 9 aa, Synthetic construct
QQYYSTPYT

SEQ ID NO: 1029 - protein, 9 aa, Synthetic construct
QQYYSTPYT

SEQ ID NO: 1030 - protein, 9 aa, Synthetic construct
QQYYSTPYT

SEQ ID NO: 1031 - protein, 9 aa, Synthetic construct
QQYYSTPYT

SEQ ID NO: 1032 - protein, 9 aa, Synthetic construct
QQYYSTPYT

SEQ ID NO: 1033 - protein, 9 aa, Synthetic construct
QQYYSTPYT

SEQ ID NO: 1034 - protein, 9 aa, Synthetic construct
QQYYSTPYT

SEQ ID NO: 1035 - protein, 9 aa, Synthetic construct
QQYYSTPYT

SEQ ID NO: 1036 - protein, 9 aa, Synthetic construct
QQYYSTPYT

SEQ ID NO: 1037 - protein, 9 aa, Synthetic construct
QQYYSTPYT

SEQ ID NO: 1038 - protein, 9 aa, Synthetic construct
QQYYSTPYT

SEQ ID NO: 1039 - protein, 9 aa, Synthetic construct
QQYYSTPYT

SEQ ID NO: 1040 - protein, 9 aa, Synthetic construct
QQYYSTPYT

SEQ ID NO: 1041 - protein, 9 aa, Synthetic construct
QQYYSTPYT

SEQ ID NO: 1042 - protein, 9 aa, Synthetic construct
QQYYSTPWT

SEQ ID NO: 1043 - protein, 9 aa, Synthetic construct
QQYFGTPRT

SEQ ID NO: 1044 - protein, 9 aa, Synthetic construct
QQYYSTPRT

SEQ ID NO: 1045 - protein, 9 aa, Synthetic construct
QQYYSTPWT

SEQ ID NO: 1046 - protein, 9 aa, Synthetic construct
QQYYGTPRT

SEQ ID NO: 1047 - protein, 8 aa, Synthetic construct
QQYYSTRT

SEQ ID NO: 1048 - protein, 9 aa, Synthetic construct
QQYYSTPRT

SEQ ID NO: 1049 - protein, 9 aa, Synthetic construct
QQYYSTPPT

SEQ ID NO: 1050 - protein, 9 aa, Synthetic construct
QQFYDTPRT

SEQ ID NO: 1051 - protein, 9 aa, Synthetic construct
QQYYSTPWT

SEQ ID NO: 1052 - protein, 9 aa, Synthetic construct
QQYYSTPYT

SEQ ID NO: 1053 - DNA, 366 bp, Synthetic construct
  source 1..366: mol_type = other DNA
caggtgcagctgcaggagtcgggcccaggactggtgaagccttcggggaccctgtccctcacctgcgctgtctctggtggctccatcagcattaataactggtggagttgggtccgccagcccccagggaaggggctggagtggcttggaaaaatctatcatagtgggaacaccgactacaacccgtccctcaagagtcgagtcaccatatcagtagacaagtccaagaatcagttctccctgaggctgagttctgtgaccgccgcggacacggccgtatattattgtgcgagcggaagcgattacgatttttggagtggttatttggactactggggccagggaaccctggtcaccgtctcctca

SEQ ID NO: 1054 - DNA, 363 bp, Synthetic construct
  source 1..363: mol_type = other DNA
gaagtgcagctggtggagtctgggggaggcttggtacagcctggcaggtccctgagactctcctgtgcagcctctggattcacctttgatgattatgccatgcactgggtccggcaagctccagggaagggcctggagtgggtctcaggtattagttggaatagtggtagcatagcctatgcggactctgtgaagggccgattcaccatctccagagacaacgccaagaactccctgtatctgcaaatgaacagtctgagagttgaggacacggcctttttttactgtgcaagagtcgcagcagcagctggtatccctttctttgactactggggccagggaaccctggtcaccgtctcctca

SEQ ID NO: 1055 - DNA, 363 bp, Synthetic construct
  source 1..363: mol_type = other DNA
caggtgcagctgcaggagtcgggcccaggactggtgaagccttctgggaccctgaccctcacctgcgctgtctctggtggctccatcaacagggataactggtggagttgggtccgccagcccccggggaaggggctggagtggattggacaaatctatcagagtgggagcaccaactacaacccgtccctcaagagtcgggtcaccatatcagtcgacaagtccaagaaccagttctccctgaagctgagttctgtgaccgccgcggacacggccgtatattactgtgcgagagtatatgactggaactacgggggtcactttgactactggggccagggaaccctggtcaccgtctcctca

SEQ ID NO: 1056 - DNA, 360 bp, Synthetic construct
  source 1..360: mol_type = other DNA
caggtgcagctgcaggagtcgggcccaggactggtgaagccttcggggaccctgtccctcacctgcgctgtctctggtgactccatcagcagtaataactggtggagttgggtccgccagcccccagggaaggggctggagtggattggacaaatctatcatagtggccacaccaactacaacccgtccctcaagagtcgagtcaccatatcggttgacatgtccaagaaccagttctccctgaagctgacctctgtgaccgccgcggacacggccgtgtattactgtgcgaggggggctacagaaattctggggtacttcgatctctggggccgtggcaccctggtcactgtctcctca

SEQ ID NO: 1057 - DNA, 366 bp, Synthetic construct
  source 1..366: mol_type = other DNA
caggtgcagctgcaggagtcgggcccaggactggtgaagccttcggagaccctgtccctcacctgcactgtctctggtggctccgtcagcagtggtagttactactggagctggatccggcagcccccagggaagggactggagtggattggatatatctataaaagtgggttcaccaattacaacccctccctcaagagtcgagtcaccatatcagtagacacgtccaagaaccagttctccctgaagctgagctctgtgaccgctgcggacacggccgtgtattactgtgcgatagggggacgtggatacagctatggtccttttgactactggggccagggaaccctggtcaccgtctcctca

SEQ ID NO: 1058 - DNA, 363 bp, Synthetic construct
  source 1..363: mol_type = other DNA
caggtgcagctggtgcagtctggggctgaggtgaagaagcctggggcctcagtgaaggtctcctgcaaggcttctggatacaccttcaccggctactatttacactgggtgcgacaggcccctggacaaggacttgagtggatgggatggatcaaccctaacagtggtgacacaaactatgtacagaactttcagggcagggtcaccatgaccagggacacgtccatcagcacagcctacatggagctgagcaggctgagatctgacgacacggccgtgtattactgtgcgagatcctacgtggataccagctcgtcggcttttgatatctggggacaagggacaatggtcaccgtctcttca

SEQ ID NO: 1059 - DNA, 360 bp, Synthetic construct
  source 1..360: mol_type = other DNA
caggtgcagctgcaggagtcgggcccaggactggtgaagccttcggagaccctgtccctcacctgcactgtctctggtggctccatcagtagttactactggagctggatccggcagccccccgggaagggactggagtggattgggtatgtctattacagtgggtacaccaagtacaacccctccctcaagagtcgagtcaccatatcagtagacacgcccaagacccagttctccctgaagatgagctctgtgaccgctgcggacacggccgtgtattactgtgcgagcgtcgaatcaaagtggaactacgggccttttgatatctggggacaagggacaatggtcaccgtctcttca

SEQ ID NO: 1060 - DNA, 372 bp, Synthetic construct
  source 1..372: mol_type = other DNA
caggtgcagctgcaggagtcgggcccaggactggtgaagccttcggagaccctgtccctcacctgcactgtctctggtgactccatcagtagttactactggagctggatccggcagcccccagggaagggactggagtggattggatatatctattacagtgggttcaccaagtacaacccctccctcaacagtcgagtcaccatatcagtagacacgtccaagagccagttctccctgaagctgacctctgtgaccgctgcggacacggccgtgtattactgtgcgatgagagagccgagaggccggtataactggaactacgggccttttgatatctggggacaagggacaatggtcaccgtctcttca

SEQ ID NO: 1061 - DNA, 351 bp, Synthetic construct
  source 1..351: mol_type = other DNA
caggtgcagctgcaggagtcgggcccaggactggtgaagccttcggggaccctgtccctcacctgcgctgtctctggtggctccatcagtaatgataactggtggagttgggtccgccagccccccgggaagggactggagtggattgggaaaatctatcatagtgagttcaccaactacaacccgtccctcaagagtcgagtcaccatatcagtagacaagtccaagaaccagttctccctggagctgaactctgtgaccgccgcggacacggccgtgtattactgtgcgagagagtatcataatttcatggacgtctggtgcaaagggaccacggtcaccgtctcctca

SEQ ID NO: 1062 - DNA, 366 bp, Synthetic construct
  source 1..366: mol_type = other DNA
caggtgcagctgcaggagtcgggcccaggactggtgaagccttcggagaccctgtccctcacctgcactgtctctggtgactccgtcagcagtggtaaatacttctggagctggatccggcagtccccagggaagggactggagtggattgggtatatctattacagtgggagcaccaactacaacccctccctcaagaatcgagtcaccatatcggtagacacgtccaagaaggagttgtctctgaagctgagttctgtgaccgctgcggacacggccgtttattactgtgcgagaggagggcataactggaactacgctgcttttgatatctggggacaagggacaatggtcaccgtctcttca

SEQ ID NO: 1063 - DNA, 351 bp, Synthetic construct
  source 1..351: mol_type = other DNA
caggtgcagctgcaggagtcgggcccaggactggtgaagccttcggggaccctgtccctcacctgcgctgtctctggtggctccatcagtaatgataactggtggagttgggtccgccagtcccccgggaaggggttggagtggattgggaaaatctatcatagtgagttcaccaactacaacccgtccctcaagagtcgagtcaccatatcagtagacaagtccaagaaccagttctccctggagctgagctctgtggccgccgcggacacggccgtgtattactgtgcgagagagtatgagaacttcatggacgtctggggcaaggggaccacggtcaccgtctcctca

SEQ ID NO: 1064 - DNA, 366 bp, Synthetic construct
  source 1..366: mol_type = other DNA
caggtgcagctgcaggagtcgggcccaggactggtgaagccttcggggaccctgtccctcacctgcgctgtctctggtgactccatcagcagtaatagctggtggaattgggtccgccagcccccagggaaggggctggagtggattgggcaaatctttcatagtggacacaccaactacaacccgtccctcaagagtcgagtcaccatgtctatagacaagtccaagaaccagttctccctgaaactgacctctgtgaccgccgcggacacggccctgtattactgtgcgagaggaggggagtatgaaaactcggcgaactggttcgacccctggggccaaggaaccctggtcaccgtctcttca

SEQ ID NO: 1065 - DNA, 366 bp, Synthetic construct
  source 1..366: mol_type = other DNA
caggtgcagctgcaggagtcgggcccaggactggtgaagccttcggggaccctgtccctcacctgcgctgtctctggtgtctccatcaacaaggataactggtggacttgggtccgccagcccccagggaaggggctggagtggattgggaaaatctatcatagtgggagcaccaactacaacccgtccctcaagagtcgagtcaccatatcagtagacaactccaagaaccaattctccctgaagctgaactctgtgaccgccgcggacacggccgtgtattactgtacgagagggggggatatagctatggagggggactggttcgccccctggggccagggaaccctggtcaccgtctcctca

SEQ ID NO: 1066 - DNA, 360 bp, Synthetic construct
  source 1..360: mol_type = other DNA
caggtgcagctgcaggagtcgggcccaggactggtgaagccttcggggaccctgtccctcacctgcgctgtctctggtggctccatcagcagtgataactggtggaattgggtccgccagcccccagggaaggggctggagtggcttggaaaaatctatcatagtgggaacaccgactacaacccgtccctcaagagtcgagtcaccatatcagtagacaagtccaagaatcagttctccctgaggctgagttctgtgaccgccgcggacacggccgtgtattactgtgcgagaggtggaactgaaactacggggtacatggacgtctggggcaaagggaccacggtcaccgtctcctca

SEQ ID NO: 1067 - DNA, 366 bp, Synthetic construct
  source 1..366: mol_type = other DNA
caggtgcagctgcaggagtcgggcccaggactggtgaagccttcggggaccctgtccctcacctgcgctgtctctggtggctccatcagcaatgataactggtggagttgggtccgccagcccccagggaaggggctggaatggattgggaaaatctatcatagtgggttcaccaactacaacccgtccctcaagagtcgagtcaccatatcagtagacaagtccaagaaccagttctccctgaagctgaactctgtgaccgccgcggacacggccgtgtattactgtgcgagagggggggataactttatggagggggaggggttagggacctggggcccgggaaccctggtcaccgtctcctca

SEQ ID NO: 1068 - DNA, 366 bp, Synthetic construct
  source 1..366: mol_type = other DNA
caggtgcagctgcaggagtcgggcccaggactggtgaagccttcggggaccctgtccctcacctgcgctgtctctggtggctccatcagcaatgataactggtggaattgggtccgccagtccccagggaaggggctggagtggattggaaaaatctatcatagtgggttcaccgactacaacccgtccctcaagagtcgagtcaccatatcagtagacaagtccaagaaccagttctccctgaagctgagctctgtgaccgccgcggacacggccgtgtattattgtgcgagaggaaaccataactatttgtggattgggtatttggggacctggggcccgggaaccctggtcaccgtctcctca

SEQ ID NO: 1069 - DNA, 357 bp, Synthetic construct
  source 1..357: mol_type = other DNA
caggtgcagctgcaggagtcgggcccaggactggtgaagccttcggggaccctgtccctcatctgcgctgtctctggtggctccatcagtagtagtaattggtggagttgggtccgccagcccccagggaaggggctggagtggattgggagaatctatcatagtgggcacaccaactacaacccgtccctcaagagtcgagtcaccatatcagtagacaagtccaagaaccagttctccctgaagctgacctctgtgaccgccgcggacacggccgtgtattactgtgcgagagggagggacttaactggatactttgactactggggccagggaaccctggtcaccgtctcctca

SEQ ID NO: 1070 - DNA, 363 bp, Synthetic construct
  source 1..363: mol_type = other DNA
caggtgcagctgcaggagtcgggcccaggactggtgaaaccttcggggaccctgtccctcacctgcgctgtctctggtggctccatcagtaatgataactggtggagttgggtccgccagtcccccgggaaggggctggagtggattgggaaaatctatcatagtgagttcaccaactacaacccgtccctcaagagtcgagtcaccatatcagtagacaagtccaagaaccagttctccctggagctgagctctgtgaccgccgcggacacggccgtatattactgtgcgagaggggtcgatttttggagtggttcccacatggacgtctggggcaaagggaccacggtcaccgtctcctca

SEQ ID NO: 1071 - DNA, 357 bp, Synthetic construct
  source 1..357: mol_type = other DNA
caggtgcagctgcaggagtcgggcccaggactggtgaagccttcggggaccctgtccctcacctgcgctgtctctggtggctccatcagtaatgataactggtggagttgggtccgccagtcccccgggaaggggctggagtggattgggaaaatctatcatagtgagttcaccaactacaacccgtccctcaagagtcgagtcaccatatcagtagacaagtctaagaaccagttttccctggaactgagctctgtgaccgccgcggacacggccgtgtatttctgtgcgcgagaaggactggaactaccccacatggacgtctggggcaaagggaccacggtcaccgtctcctca

SEQ ID NO: 1072 - DNA, 351 bp, Synthetic construct
  source 1..351: mol_type = other DNA
gaggtgcagctggtggagtccgggggaggcgtggtcaagcctggggggtccctgagactctcctgtgcagcctctggattcaccttcagtagctactggatgcactgggtccgccaagctccagggaaggggctggtgtgggtctcacgtattaatagtgatggaagtagcacaagctacgcggactccgtgcagggccgattcaccatctccagagacatcgccaagaacacgctgtatctgcaaatgaacagtctgagagccgaggacacggctgtgtattactgtgcaagagggcagcacctggttcaggactattggggccagggaaccctggtcaccgtctcttca

SEQ ID NO: 1073 - DNA, 363 bp, Synthetic construct
  source 1..363: mol_type = other DNA
caggtgcagctggtgcagtctggggctgaggtgaagaaccctggggcctcagtgaaggtctcctgcaaggcttctggatacaccttcaccggctactatatgcactgggtgcgacaggcccctggacaagggcttgagtggatgggatggatcaaccctaacagtggtggcacaaactatgcacagaagtttcagggcagggtcaccatgaccagggacacgtccatcagcacagcctacatggagctgagcaggctgagatctgacgacacggccgtgtattactgtgcgagagaacggggcgactatgatggcgatgcttttgatatctggggacaagggacaatggtcaccgtctcttca

SEQ ID NO: 1074 - DNA, 360 bp, Synthetic construct
  source 1..360: mol_type = other DNA
gaggtgcagctggtggagtctgggggaggcttggtccagcctggggggtccctgagactctcctgtgcagcctctggattcacctttagtaactattacatgaactgggtccgccaggctccagggaaggggctggagtgggtggccaacataaagcaagatggaagtgagaaatactatgtggactctgtgaagggccgcttcaccatctccagagacaacgccaagaactcactgtatctccaaatgaacagcctgagagccgaggacacggctgtgtattactgtgcgagagatgggtactacaacttcgatgcttttgatatctggggacaagggacaatggtcaccgtctcttca

SEQ ID NO: 1075 - DNA, 363 bp, Synthetic construct
  source 1..363: mol_type = other DNA
gaggtgcagctggtggagtctgggggaggcttggtacagcctggggggtccctgagactctcctgtgcagcctctggattcaccttcagtagctatagcatgaactgggtccgccaggctccagggaaggggctggagtgggtctcatccattagtagtagtagtagttacatatactacgcagactcagtgaagggccgattcaccatctccagagacaacgccaagaactcactgtatctgcaaatgaacagcctgagagccgaggacacggccgtgtattactgtgcgagagaagggtatgataactggaactctgcttgtgatatctggggacaagggacaatggtcaccgtctcttca

SEQ ID NO: 1076 - DNA, 363 bp, Synthetic construct
  source 1..363: mol_type = other DNA
cagatcaccttgaaggagtctggtcctacgctggtgaaacccacacagaccctcacgctgacctgcaccttctctgggttttcactcagcactagtggagtgggtgtgggctggatccgtcagcccccaggaaaggccctggagtggcttgcactcatttattggaatggtgatgagcgctacagcccatctctgaagagcaggctcaccatcaccaaggacacctccaaaaaccaagtggtccttacaatgaccaacatggaccctgtggacacagccacatattactgtgcacacagtccgaactggggatatgaagcttttgatatctggggacaagggacaatggtcaccgtctcttca

SEQ ID NO: 1077 - DNA, 363 bp, Synthetic construct
  source 1..363: mol_type = other DNA
gaggtgcagctggtggagtctgggggaggcctggtcccgcctggggggtccctgagactctcctgtgcagcctctggattcaccttcagtagctattgcatgaactgggtccgccaggctccagggaaggggctggagtgggtctcatccattaatagtgatagtagttacatatactacgcggactcagtgaagggccgattcaccatctccagagacaacgccaagaactcactgtatctgcaaatgaacagcctgagagccgaggacacggctgtgtattactgtgcgagagagggatactacaactggaacggagggaatgactactggggccagggaaccctggtcaccgtctcctca

SEQ ID NO: 1078 - DNA, 360 bp, Synthetic construct
  source 1..360: mol_type = other DNA
gaggtgcagctggtggagtccgggggaggcttagttcagcctggggggtccctgagactctcctgtgcagcctctggattcaccttcagtagctattggatgcactgggtccgccaagctccagggaaggggctggtgtgggtctcacatattaatagtgatgggagtagcacaaactacgcggactccgtgaagggccgattcaccatctccagagacaacgccaagaacacgctgtatctgcagatgaacagtctgagatccgaggacacggctgtatattactgtgcaagagagggttactggaacggtgatacttttgatatctggggacaagggacaatggtcaccgtctcttca

SEQ ID NO: 1079 - DNA, 363 bp, Synthetic construct
  source 1..363: mol_type = other DNA
gaggtgcagctggtggagtctgggggaggcttggtacagcctggggggtccctgagactctcctgtgcagcctctggattcaccttcagtgcctacgacatgcactgggtccgccaaactccaggaaaaggtctggagtgggtctcaactattggtactgctggtgacacatactatccagactccgtgaagggccgattcaccatctccagagattttgccaggaggtccttgtatcttcacatgaacaatctgagagccggggacacggctgtatattactgtgcaagagggggcagcagcagctggtacgactggtacttcgatctctggggccgtggcaccctggtcactgtctcctca

SEQ ID NO: 1080 - DNA, 363 bp, Synthetic construct
  source 1..363: mol_type = other DNA
caggtgcagctgcaggagtcgggcccaggactggtgaagccttcggggaccctgtccctcacctgcgctgtctctggtggctccatcagcagtagtacctggtggagttgggtccgccagcccccagggaaggggctggagtggattggggaaatctatcatagtgggagcaccaactataacccgtccctcaagagtcgagtcaccatatcactagacaagtccaagaaccagttttccctgaagctgagctctgtgaccgccgcggacacggccgtgtattactgtgcgattagtttatacaactggaacgatgctgcttttgatatctggggacaagggacaatggtcaccgtctcttca

SEQ ID NO: 1081 - DNA, 360 bp, Synthetic construct
  source 1..360: mol_type = other DNA
caggtgcagctggtgcagtctgggtctgaggtgaagaagcctggggcctcagtgaaggtctcctgcaagacttctggatacacgttcaccggctactatatgcactgggtgcgacaggcccctggacaagggcttgagtggatgggatggatcaaccctaacagtggtggcacaacctatgcacagaagtttcagggcagggtcaccatgaccagggacacgtccatcagcacagcctacatggagctgaacaggctgagatctgacgacacggccgtgtattactgtgcgagagaggcaggtggttcaggtgaatacttccagcactggggccagggcaccccggtcaccgtctcttca

SEQ ID NO: 1082 - DNA, 363 bp, Synthetic construct
  source 1..363: mol_type = other DNA
cagatcaccttgaaggagtctggtcctacgctggtgaaacccacacagaccctcacgctgacctgcaccttctctgggttctcactcagcactagtggagtgggtgtgggctggatccgtcagcccccaggaaaggccctggagtggcttgcactcatttattggaatgatgttaagttctacagtccatctctgcagagcaggctcaccatcaccaaggacacctccaaaaaccaggtggtccttacactgaccaacatggaccctgtggacacagccacatattactgtgcacacggggataactggaactaccgtgcttttgatatctggggacaagggacaatggtcaccgtctcttca

SEQ ID NO: 1083 - DNA, 348 bp, Synthetic construct
  source 1..348: mol_type = other DNA
caggttcagctggtgcagtctggagctgaggtgaagaagcctggggcctcagtgaaggtctcctgcaaggcttctggttacacctttaccagctatggtatcagctgggtgcgacaggcccctggacaagggcttgagtggatgggatggatcagcgcttataatggtaacacacactatgcacagaacctccagggcagagtcaccatgaccacagacacatccacgagcacagcctacatggagctgaggagcctgagatctgacgacacggccgtgtattactgtgcgaggagtatagcagcccttgacttctggggccagggaaccccggtcaccgtctcctca

SEQ ID NO: 1084 - DNA, 363 bp, Synthetic construct
  source 1..363: mol_type = other DNA
caggtgcagctgcaggagtcgggcccaggactggtgaagccttcggggaccctgtccctcacctgcgctgtctctggtggctccatcagcagtaataactggtggagttgggtccgccagcccccagggaagggactggagtggattggacaaatctatcatagtgaaaacaccaactacaacccgtccctcaagagtcgagtcaccatatcagtagacaagtccaagaaccagttctccctgaagctgagctctgtgaccgccgcggacacggccatctattactgtgcgagagtggatgactggaactacgggggtcactttgactactggggccagggaaccctggtcaccgtctcctca

SEQ ID NO: 1085 - DNA, 348 bp, Synthetic construct
  source 1..348: mol_type = other DNA
caggttcagctggtgcagtctggagctgaggtgaagaagcctggggcctcagttaaggtctcctgcaaggcttctggttacacctttaccggctatggtatcagctgggtgcgacaggcccctggacaagggcttgagtggatgggatggatcagcgcttacaatggtaacacacactatgcacagaacctccagggcagagtcaccatgaccaccgacacatccacgaacacagcctacatggagctgaggagccttatatctgacgacacggccttttattattgtgcgagagcgggactggggatcgactactggggccagggaaccctggtcactgtctcctca

SEQ ID NO: 1086 - DNA, 360 bp, Synthetic construct
  source 1..360: mol_type = other DNA
caggtgcagctgcaggagtcgggcccaggactggtgaagccttcggggaccctgtccctcacctgcgctgtctctggtggctccatcagcagtagtgactggtggagttgggtccgccagtccccagggaaggggctggagtggattggggaaatctatcatagtgggagcaccaactacaacccgtccctcaagagtcgagtctccatatcagtagacaagtccaagaaccagttctccctgaagctgagctctgtgaccgccgcggacacggccgtgtattactgtgcgagaggggggcacataggctactactacatggacgtctggggcaaagggaccacggtcaccgtctcctca

SEQ ID NO: 1087 - DNA, 366 bp, Synthetic construct
  source 1..366: mol_type = other DNA
gaggtgcagctggtgcagtctggagcagaggtgaaaaagcccggggagtctctgaagatctcctgtaagggttctggatacagctttaccaactactggatcggctgggtgcgccagatgcccgggaaaggcctggagtggatggggatcatctatcctggtgactctgataccatatacagcccgtccttccaaggccaggtcaccttctcagccgacaagtccatcaacaccgcctacctgcagtggagcagcctgaaggcctcggacaccgccatgtattactgtgcgagaggacgtggatatagtggctacgaaggtgcttttgatatctggggacaagggacaatggtcaccgtctcttca

SEQ ID NO: 1088 - DNA, 348 bp, Synthetic construct
  source 1..348: mol_type = other DNA
caggttcagctggtgcagtctggagctgaggtgaagaagcctggggcctcagtgaaggtctcctgcaaggcttctggttacacctttaccaactatggtatcagctgggtgcgacaggcccctggacaagggcttgagtggatgggatggatcagcgcttacaatggtaacacacactatgcacagaaactccagggcagagtcaccatgaccacagacacatccacgagcacagcctacatggagctgaggagcctgagatcagacgacacggccgtgtattactgtgcgagagcggcagcagccgttgactactggggccagggaaccctggtcaccgtctcttca

SEQ ID NO: 1089 - DNA, 366 bp, Synthetic construct
  source 1..366: mol_type = other DNA
caggtgcagctgcaggagtcgggtccaggactggtgaagccttcggagaccctgtccctcagttgcactgtctctggtggctccgtcagcagtggtagttactactggagctggatccggcagcccccagggaagggactggagtggattgggtatatctattacagtgggagcaccaagtacaacccctccctcaagagtcgagtcaccatatcagtagacacgtccaagaaccaggtctccctgaagctgagttctgtgaccgctgcggacacggccgtgtattactgtgcgagagataaggggcactggaactacggtgcttttgatatctggggacaagggacaatggtcaccgtctcttca

SEQ ID NO: 1090 - DNA, 366 bp, Synthetic construct
  source 1..366: mol_type = other DNA
caggtgcagctgcaggagtcgggcccaggactggtgaagccttcggggaccctgtccctcacctgcgctgtctctggtggctccatcagcagtaataactggtggagttgggtccgccagcccccagggaaggggctggagtggattggggaaatctatcatagtggaaatattaactacaacccgtccctcaagagtcgagtcaccatatcagtggacaagtccaagaaccagttctccctgaagctgagctctgtgaccgccgcggacacggccgtgtattactgtgcgagagggggggaatacggtgaccccgtggggtacttcgatctctggggccgtggcaccctggtcactgtctcctca

SEQ ID NO: 1091 - DNA, 357 bp, Synthetic construct
  source 1..357: mol_type = other DNA
caggttcagctggtgcagtctggagctgaggtgaagaagcctggggcctcagtgaaggtctcctgcaaggcttctggttacacctttaccacctatggtatcagctgggtgcgacaggcccctggacaagggcttgagtggatgggatggatcagcgcttacagtggtaacacaaactatgcacagaagctccagggcagagtcaccatgaccacagacacatccacgagcacagcctacatggagctgaggagcctgagatctgacgacacggccgtgtattactgtgcgagagagagagtctccaactgggtctttgacttctggggccagggaaccctggtcactgtctcctca

SEQ ID NO: 1092 - DNA, 360 bp, Synthetic construct
  source 1..360: mol_type = other DNA
caggtgcagctgcaggagtcgggcccaggactggtgaagccttcggggaccctgtccctcacctgcgctgtctctggtggttccatcagcagtagtgactggtggagctgggtccgccagcccccagggaaggggctggagtggattggggaaatctatcatagtaggaacaccaactacaacccgtccctcaagagtcgagtcaccatatcagtagacaagtccaagaaccagttctccctgaagctgagttctgtgaccgccgcggacacggccgtgtattactgtgcgagtggaggtgtggtggccgactactacatggacgtctggggcaaagggaccacggtcaccgtctcctca

SEQ ID NO: 1093 - DNA, 369 bp, Synthetic construct
  source 1..369: mol_type = other DNA
gaggtgcagctggtggagtctgggggaggcctggtcaagcctggggggtccctgagactctcctgtgcagcctctggattcaccttcagtagctatggcatgaactgggtccgccaggctccagggaaggggctggagtgggtctcatccattagtggttatggtagttacatatactacgcagcctcagtgaagggccgattcaccatctccagagacagcgccaagaactcactgtatctgcaaatgaacagcctgagcgccgaggacacagctgtgtattactgtgcgagagaattaggtgggatctactacggggtagggtacttcgatctctggggccgtggcaccctggtcactgtctcctca

SEQ ID NO: 1094 - DNA, 366 bp, Synthetic construct
  source 1..366: mol_type = other DNA
caggtgcagctgcaggagtcgggcccaggactggtgaagccttcggagaccctgtccctcacctgcgctgtctctggtggctccgtcagcagtggtaattactattggagctggatccggcagcccccagggaagggactggagtggattgggtatatctattccagtgggagcaccaactacaacccctccctcaagagtcgagtcaccatatcaatagacacgtccaagaaccagttctccctgaagctgagctctgtgaccgctgcggacacggccgtgtattactgtgcgagaagtcctcgtggatacagctatggtccctttgcctactggggccaggggaccctggtcaccgtctcttca

SEQ ID NO: 1095 - DNA, 366 bp, Synthetic construct
  source 1..366: mol_type = other DNA
caggtgcagctgcaggagtcgggcccaggactggtgaagccttcacagaccctgtccctcacctgcactgtctctggtggctccatcagcagtggtggttacaactggaactggatccgccagcacccagggaagggcctggaatggattgggtacatcaattacagtgggaatacctattacaacccgtccctcaagagtcgagttaccatatcagtagacacgtctaagaaccagttctccctgaagctgagttctgtgactgccgcggacacggccgtttattactgtgcgagagggcccctggatacagctatggccccctttgactactggggccagggaaccctggtcaccgtctcctca

SEQ ID NO: 1096 - DNA, 360 bp, Synthetic construct
  source 1..360: mol_type = other DNA
caggtgcagctgcaggagtcgggcccaggactggtgaagccttcggagaccctgtccctcacctgtactgtctctggtgactccatcagtagttactactggagttggatccggcagcccccagggaagggactggagtggattggatatatctattatagtgggttcaccaagtacaacccctccctcaagagtcgagtcaccatttcagtagacacgtccaagaaccagttctccctgaggctgagctctgtgaccgctgcggacacggccgtgtattactgtgcgagcgtcgattcaaagtggaactacgggtcttttcatatctggggacaagggacaatggtcaccgtctcttca

SEQ ID NO: 1097 - DNA, 375 bp, Synthetic construct
  source 1..375: mol_type = other DNA
caggtgcagctgcaggagtcgggcccagggctggtgaagccttcggagaccctgtccctcacctgctctgtctctggtgactccgtcagcaataatcgttattattggagctggattcggcagcccccagggaagggactggagtggattgggtatatctattacagtgggagcaccaactacaacccctccctcaagagtcgagtcaccatatcagtagacacgtccaagaaccagttgtccctgaacctgagttctgtgaccgctgcggacacggccgtgtattactgtgcgagagatcgcccatcccggtataagtggaattacgatgcttttgctatctggggacaagggacaatggtcaccgtctcttca

SEQ ID NO: 1098 - DNA, 357 bp, Synthetic construct
  source 1..357: mol_type = other DNA
caggtgcagctacagcagtggggcgcaggactgttgaagccttcggagaccctgtccctcacctgcgctgtctatggtgggtccttcagtgattactactggacctggatccgccagcccccagggaaggggctggagtggattggtgaagtcaatcatattggaagcaccaactacaacccgtccctcaagagtcgagtcaccatatcagtagacacgtccaagaaccagttctccctgaacctgagctctgtgaccgccgcggacacggctgtgtattactgtgcgaagtatagcacttcctggtacggctggttcgacccctggggccagggaaccctggtcactgtctcctca

SEQ ID NO: 1099 - DNA, 366 bp, Synthetic construct
  source 1..366: mol_type = other DNA
caggtgcagctgcaggagtcgggcccagggctggtgaagccttcggggaccctgtccctcacctgcgctgtctctggtgactccatcagcagtaataactggtggagttggttccgccagcccccagggaagggactggagtggattgggagaatctatcatagtgggaccaccaactacaacccgtccctcgagagtcgagtcaccatatcagtagacaactccaggaaccagttctccctgaaactgagctctgtgaccgccgcggacacggccgtgtattactgtgcgagaggcgaggagtgggagctgcggggaggtgtttttgatatctggggacaagggacaatggtcaccgtctcttca

SEQ ID NO: 1100 - DNA, 348 bp, Synthetic construct
  source 1..348: mol_type = other DNA
caggtgcagctggtgcaatctgggcctgagttgaagaagcctggggcctcagtaaaggtttcctgcaaggcttctggatacaccttcactaactatgctgtgaattgggtgcgacaggcccctggacaagggcttgagtggatgggatggatcaacaccaacactgggcacccaacgtatgcccagggcttcacaggacggtttgtcttctccttggacacctctgtcagtacggcatatctgcagatcagcagcctaaaggctgaggacactgccgtttattactgtgcgagagacagcagcagctggggctactggggccagggaaccctggtcactgtctcctca

SEQ ID NO: 1101 - DNA, 357 bp, Synthetic construct
  source 1..357: mol_type = other DNA
caggtgcagctgcaggagtcgggcccaggactggtgacgccttcggggaccctgtccctcacctgcgctgtctctggtgactccatcagtagtgataactggtggagttgggtccgccagcccccagggaagggactggagtggattggggaaatctatcacagtgaaaacaccaactacaacccgtccctcaagagtcgagtcaccatatcagtagacaagtccaagaaccagttctccctgaggctgaactctgtgaccgccgcggacacggccatgtattactgtgcgagagggagggagctaactggcctctttgactactggggccagggaaccctggtcaccgtctcctca

SEQ ID NO: 1102 - DNA, 360 bp, Synthetic construct
  source 1..360: mol_type = other DNA
caggtgcagctgcaggagtcgggcccaggactggtgaagccttcggggaccctgtccctcacctgcgctgtctctggtggctccatcagcagtaataactggtggagttgggtccgccagcccccaggaaagggactggaatggattggggacatctatcatagtggaaacaccaactacaacccgtccctcaagagtcgagtcaccctatcagtagacatgtccaagaaccagttctccctgaaactgaactctgtgaccgccgcggacacggccgtgtattactgtgcgagaggaggtatagcagtgactgcctactttgactactggggccagggaaccctggtcaccgtctcctca

SEQ ID NO: 1103 - DNA, 366 bp, Synthetic construct
  source 1..366: mol_type = other DNA
caggtgcagctggtgcagtctggggctgaggtgaagaagcctggggcctcagtgaaggtctcctgcaaggcttctggatacaccttcaccggctactatttgcactgggtgcgacaggcccctggacaagggcttgagtggatgggatggatcaaccctcacagtggtggcacaatctatgcacagaagtttcaggacagggtcaccatgaccagggacacgtccatcagcacagcctacatggagctgagcaggctgagatctgacgacacggccgtgtattactgtgcgaactggaactccggggactcctactactactacatggacgtctggggcaaagggaccacggtcaccgtctcctca

SEQ ID NO: 1104 - DNA, 363 bp, Synthetic construct
  source 1..363: mol_type = other DNA
caggtgcagctgcaggagtcgggcccaggactggtgaagccttcggggaccctgtccctcacctgcgctgtctctggtggttccatcagcagtgataactggtggaattgggtccgccagcccccagggaaggggctggagtggattggaaaaatctatcatagtgggaacaccaactacaacccgtccctcaagagtcgagtcaccatatcagtagacgagtccaagaaccagttctccctgaggctgtactctgtgaccgccgcggacacggccgtgtattactgtgcgagaggggtcgatttttggagtggttcccacatggacgtctggggcaaagggaccacggtcaccgtctcctca

SEQ ID NO: 1105 - DNA, 360 bp, Synthetic construct
  source 1..360: mol_type = other DNA
caggtgcagctgcaggagtcgggcccaggactggtgaagccttcggggaccctgtccctcacctgcgctgtctctggtggctccattagcagtaataattggtggagttgggtccgccaggccccagggaaggggctggagtggattgggaagatctatcaaagtgggagcaccatgtacaacccgtccctcaagagtcgagtcaccatgtcggtagacaagtccaagaaccagttctccctgattctgagttctgtgaccgccgcggacacggccgtgtattactgtgcgagagataaaccccctttactgggagcctttgactactggggccagggaaccctggtcactgtctcctca

SEQ ID NO: 1106 - DNA, 360 bp, Synthetic construct
  source 1..360: mol_type = other DNA
caggtgcagctggtggagtctgggggaggcgtggtccagcctgggaggtccctgagactctcctgtgcagcctctggattcaccttcagtagctatgccatgcactgggtccgccaggctccaggcaaggggctggagtgggtggcagttatatcatatgatggaagtaataaatactatgcggactccgtgaagggccgattcaccatctccagagacaattccaagaacacgctgtctctgcaaatgaacagcctgagagctgaggacacggctgtgtattactgtgcgaaaagggggggatacagctatggtccttttgaacactggggccagggaaccctggtcaccgtctcctca

SEQ ID NO: 1107 - DNA, 354 bp, Synthetic construct
  source 1..354: mol_type = other DNA
caggtgcagctggtgcaatctgggtctgaattgaagaagcctggggcctcagtgaaggtttcctgcaaggcttctggatacaccttcactagctatactatgaattgggtgcgacaggcccctggacaagggcttgagtgggtgggatggatcaacaccgccactgggaccccaacgtatgcccagggcttcacaggacggtatgtcttctccttggacacctctgtcagcacggcttatctgcagatcagcggcctaaaggctgaggacactgccgtgtatttctgtgcgaggtatagtgggagccactcctttgactactggggccagggaaccctggtcaccgtctcttca

SEQ ID NO: 1108 - DNA, 357 bp, Synthetic construct
  source 1..357: mol_type = other DNA
caggtgcagctgcaggagtcgggcccaggactggtgaagccttcggggaccctgtccctcacctgcgctgtctctggtggctccatcagtagtgattactggtggagttgggtccgccagtccccagggaaggggctggagtggattgggaaaatctatcatagtgggaacaccaaccacaacccgtccctcaagagtcgagtcaccatatcaatagacaagtccaggaaccagttctccctgaatctgaactctgtgaccgccgcggacacggccgtgtattactgtgcgagagaaggactggaacttccccacatggacgtctggggcaaagggaccacggtcaccgtctcctca

SEQ ID NO: 1109 - DNA, 360 bp, Synthetic construct
  source 1..360: mol_type = other DNA
caggtgcagctggtggagtctgggggaggcttggtccagcctgggaggtccctgagactctcctgtgcagcctctggattcaccttcagtagttatgctatgcactgggtccgccaggctccaggcaaggggctggagtgggtgacagttatatcatatgatggaagtaataaatactatgcagactccgtgaagggccgattcaccatctccagagacaattccaagaacacgctgtatctgcaaatgaacagcctgagagctgaggacacggctgtgtattactgtgcgaaaaggggtaactggaactacggaccttttcactactggggccagggaaccctggtcactgtctcctca

SEQ ID NO: 1110 - DNA, 345 bp, Synthetic construct
  source 1..345: mol_type = other DNA
caggtgcagctggtggagtctgggggaggcgtggtccagcctgggaggtccctgagactctcctgtgcagcctctggattcaccttcagtgcctatgccatccactgggtccgccaggctccaggcaaggggctggagtgggtggcagttatatcatatgatggaagtaataaaaagtatgcagactccgtgaagggccgattcaccatctccagagacaattccaagaacacgctggatctggaaatgaacagcctgagagctgaggacacggctgtgtactactgtgcgaaagggctaccttttgactactggggccagggaaccctggtcaccgtctcctca

SEQ ID NO: 1111 - DNA, 354 bp, Synthetic construct
  source 1..354: mol_type = other DNA
caggtgcagctggtgcaatctgggtctgacttgaagaagcctggggcctcagtgaaggtttcctgcaaggcttctggatacaccttcactagttatactatgaattgggtgcgacaggcccctggacaagggcttgagtggatgggatggatcaacaccaacactgggaccccaacgtatgcccagggcttcacaggacggtttgtcttctccttggacacctctgtcagcacggcatatctgcagatcagcagcctaaaggctgaggacactgccgtgtattactgtacgaggtatactgggaactactcctttgactactggggccagggaaccctggtcaccgtctcctca

SEQ ID NO: 1112 - DNA, 375 bp, Synthetic construct
  source 1..375: mol_type = other DNA
gaggtgcagctggtggagtctgggggagtcttggtacagcctggggggtccctgagactctcctgtgcagcctctggattcacctttaggagctatgccatgagctgggtccgccaggctccagggaaggggctggagtgggtctcagctattagtggtagtggtgatagcacatacttcgcagactccgtgaagggccggttcaccatctccagagacaattccaagaacacgctgtctctgcaaatgaacagcctgagagccgaggacacggccgtatattactgtgcgagcatcctaggatattgtagtggtaccagctgctatggcctctttgacaactggggccagggaaccctggtcaccgtctcctca

SEQ ID NO: 1113 - DNA, 351 bp, Synthetic construct
  source 1..351: mol_type = other DNA
caggtgcagctgcaggagtcgggcccaggactggtgaagccttcggggaccctgtccctcacctgcgctgtctctggtggctccatcagtaatgataactggtggagttgggtccgccagtcccccgggaaggggctggagtggattgggaaaatctatcatagtgagttcaccaactacaacccgtccctcaggagtcgagtcaccatatcagtagacaagtccaagaaccagttctccctggagctgacctctgtgaccgccgcggacacggccgtgtattactgtgcgagagagtatcagaactacatggacgtctggggcaaagggaccacggtcaccgtctcctca

SEQ ID NO: 1114 - DNA, 363 bp, Synthetic construct
  source 1..363: mol_type = other DNA
caggtgcagctgcaggagtcgggcccaggactggtgaagccttcggggaccctgtccctcacctgcgttgtctctggtgactccatcagcagtaataactggtggagttgggtccgccagcccccagggaagggtctggagtggattggacaaatctatcatagtggaatcaccaactacaacccgtccctcaagagtcgagtcaccatatcagtagacaagtccaagaaccagttctccctggagctgacctctgtgaccgccgcggacgcggccgtgtattactgtgcgagggcccagtgggaactacgagcgggctggttcgacccctggggccagggaaccctggtcaccgtctcctca

SEQ ID NO: 1115 - DNA, 357 bp, Synthetic construct
  source 1..357: mol_type = other DNA
gaggtgcagctggtggagtctgggggaggcttggtaaagcctggggggacccttacactctcctgtgcagcctctggattcactttcagtaacgcctggatgagctgggtccgccaggctccagggaaggggctggagtgggttggccgtattaaaagcaaaactgatggcgggacaacagactacgctgcacccgtgaaaggcagattcaccatctcaagagatgattcaaaaaacacgctgtatctgcaaatgaacagcctgaaaaccgaggacacagccgtgtattactgtaccccccggtacaactcggactttgactactggggccaaggaaccctggtcaccgtctcttca

SEQ ID NO: 1116 - DNA, 360 bp, Synthetic construct
  source 1..360: mol_type = other DNA
caggtgcagctgcaggagtcgggcccaggactggtgaagccttcggagaccctgtccctcacctgcactgtctctggtggctccatcagtagttactactggagctggatccggcagcccccagggaagggactggagtggattgggtatatctattacagtgggttcaccaagtacaacccctccctcaagagtcgagtcaccatatcagtagacacgtccaagaaccagttctccctgaagctgagctctgtgaccgctgcggacacggccgtgtattactgtgcgacccaccctcgtggatacaactatggtccctttgactactggggccagggaaccctggtcactgtctcctca

SEQ ID NO: 1117 - DNA, 363 bp, Synthetic construct
  source 1..363: mol_type = other DNA
caggtgcagctgcaggagtcgggcccaggactggtgaagccttcggagaccctgtccctcacctgcactgtctctggtggctccgtcaacagtggtcgttactactggagctggatccggcagcccccagggaagggactggagtggattgggtatatctattccagtgggtacaccaactacaacccctccctcaagagtcgagtcaccatgttactagacacgtccaagaaccagttctccctgaagctgaactccgtgaccgctgcggacacggccgtgtattactgtgcgaggtcacgtggataccgctatggtccctttgactactggggccagggaaccctggtcaccgtctcctca

SEQ ID NO: 1118 - DNA, 348 bp, Synthetic construct
  source 1..348: mol_type = other DNA
caggtgcagctggtgcaatctgggtctgagttgaagaagcctggggcctcagtgaaggtttcctgcgaggcttctggatacaccttcactagctatgctatgaattgggtgcgacaggcccctggacaagggcttgagtggatgggatggatcaacaccaacactgggaccccaacttatgcccagggcttcacaggacggtttgtcttctccttggacacctctgtcagcacggcatatctgcagatcagcagcctaaaggctgaggacactgccgtgtattactgtgcgagtcatagcacctcgtttgactactggggccaggggaccctggtcaccgtctcctca

SEQ ID NO: 1119 - DNA, 357 bp, Synthetic construct
  source 1..357: mol_type = other DNA
caggtgcagctacagcagtggggcgcaggactggtgaagccttcggagaccctgtccctcacctgcgctgtccatggtgggtccttcagtgattactacttgacctggattcgccagcccccagggaaggggctggagtggattggggaaatcaatcatagtggaagcaccaactacaacccctccctcaagagtcgagtcaccttatcaatagacacgtccaagaaccagttctccctgaagctgagctctgtgaccgccgcggacacggctgtgtattactgtgcgagaggtagtgaagactactactattacatggacgtctggggcaaagggaccacggtcaccgtctcctca

SEQ ID NO: 1120 - DNA, 363 bp, Synthetic construct
  source 1..363: mol_type = other DNA
gaggtgcagctggtgcagtctggagcagaggtgaaaaagcccggggagtctctgaagatctcctgtaagggttctggatacatctttaccagctactggatcggctgggtgcgccagatgcccgggaaaggcctggagtggatggggatcatctatcctggtgactctgataccagatacagcccgtctttccaaggccaggtcaccatctcagccgacaagtccatcatcaccgcctacctgcagtggagcagcctgaaggcctcggacaccgccatgtattactgtgcgagacacgactactttgatattggaggttattttgactactggggccagggaaccctggtcaccgtctcctca

SEQ ID NO: 1121 - DNA, 351 bp, Synthetic construct
  source 1..351: mol_type = other DNA
caggtgcagctggtgcagtctggggctgaggtgaagaagcctggggcctcagtgaaggtctcctgcaaggctgatggatacaccttcaccgactactatatgcactgggtgcgacaggcccctggacaagggcatgagtggatgggatggatcaaccctaacagtggtgtcacatactatgcacagaagtttcagggcagggtcaccatgaccagggacacgtccatcagcacagcctacatggagctgaacagacttagatctgacgacacggccgtgtattactgtgcgagagatcggaccttctactttgactactggggccagggaaccctggtcactgtctcctca

SEQ ID NO: 1122 - DNA, 378 bp, Synthetic construct
  source 1..378: mol_type = other DNA
caggtgcagctggtgcagtctggggctgaggtgaagaagcctggggcctcagtgaaggtctcctgcaaggcttctggatacaccttcaccgactactatatgcactgggtgcgacaggcccctggacaagggcttgagtggatgggatggatcaaccctaacaatggtggcacagactatgcacagaagtttcagggcagggtcaccatgaccagggacacgtccatcagcacagcctacatggagttacacaggctaagatctgacgacacggccgtgtatttctgtgcgagaggggtctatgatgtagtagttccaactgctatcgtcaactggttcgacccctggggccagggaaccctggtcaccgtctcctca

SEQ ID NO: 1123 - DNA, 360 bp, Synthetic construct
  source 1..360: mol_type = other DNA
caggtgcagctgcaggagtcgggcccaggactggtgaagccttcggggaccctgtccctcacctgcgctgtctctggtgactccatcagcaatgattactggtggaattgggtccgccagcccccagggaagggtctggagtggattggagaaatctatcatagtgggcacaccaactacaacccgtccctcaagagtcgagtcaccatatcagtagacaagtccaagaaccagttgtccctgaagctgacctctgtgaacgccgcggacacggccgtgtattactgtgcgagaggtggaactgaaattacggggtacatggacgtctggggcaaagggaccacggtcaccgtctcctca

SEQ ID NO: 1124 - DNA, 363 bp, Synthetic construct
  source 1..363: mol_type = other DNA
caggtgcagctgcaggagtcgggcccaggactggtgaagccttcggggaccctgtccctcacctgcgctgtctctggtgcctccatcagaagtggtcactggtggagttgggtccgccagcccccagggaagggactggagtggattggggaaatctatcatagtgggaacaccaactacaacccgtccctcaagagtcgagtcaccctatcagtagacaagtccaagaaccagttctccctgaagctgagctctgtgaccgccgcggacacggccgtgtattactgtgcgagaggtcactacggtgactacgtcgtctactttgactactggggccagggaaccctggtcactgtctcctca

SEQ ID NO: 1125 - DNA, 360 bp, Synthetic construct
  source 1..360: mol_type = other DNA
caggtgcagctgcaggagtcgggcccaggactggtgaagccttcggagaccctgtccctcacctgcactgtctctggtggctccatcagtagttactattggagctggatccggcagcccccagggaagggactggaatggattggttatgtctattacagtgggtacaccaagtacaatccctccctcaagagtcgagtcaccatatcaatagacgcgtccaagaaccagttctccctgaagctgacctctgtgaccgctgcggacacggccgtgtattactgtgcgaccgtcgaatcaaagtggaactacgggccttttgctatctggggacaagggacaatggtcaccgtctcttca

SEQ ID NO: 1126 - DNA, 369 bp, Synthetic construct
  source 1..369: mol_type = other DNA
caggtgcagctggtgcagtctggggctgaggtgaagaagcctggggcctcagtgaaggtctcctgcaaggcttctggatacaccttcaccggctactatatgaactgggtgcgacaggcccctggacaagggcttgagtggatgggatggatcaaccctaacagtggtgccacaaactatgcacagaagtttcagggcagggtcaccatgaccagggacacgtccatcagcacagactacatggaactgagcaggctgagatctgacgacacggccgtttattactgtgcgagagatggggctaagtggaatcacgagggttactactttgactactggggccagggaaccctggtcaccgtctcctca

SEQ ID NO: 1127 - protein, 122 aa, Synthetic construct
QVQLQESGPGLVKPSGTLSLTCAVSGGSISINNWWSWVRQPPGKGLEWLGKIYHSGNTDYNPSLKSRVTISVDKSKNQFSLRLSSVTAADTAVYYCASGSDYDFWSGYLDYWGQGTLVTVSS

SEQ ID NO: 1128 - protein, 121 aa, Synthetic construct
EVQLVESGGGLVQPGRSLRLSCAASGFTFDDYAMHWVRQAPGKGLEWVSGISWNSGSIAYADSVKGRFTISRDNAKNSLYLQMNSLRVEDTAFFYCARVAAAAGIPFFDYWGQGTLVTVSS

SEQ ID NO: 1129 - protein, 121 aa, Synthetic construct
QVQLQESGPGLVKPSGTLTLTCAVSGGSINRDNWWSWVRQPPGKGLEWIGQIYQSGSTNYNPSLKSRVTISVDKSKNQFSLKLSSVTAADTAVYYCARVYDWNYGGHFDYWGQGTLVTVSS

SEQ ID NO: 1130 - protein, 120 aa, Synthetic construct
QVQLQESGPGLVKPSGTLSLTCAVSGDSISSNNWWSWVRQPPGKGLEWIGQIYHSGHTNYNPSLKSRVTISVDMSKNQFSLKLTSVTAADTAVYYCARGATEILGYFDLWGRGTLVTVSS

SEQ ID NO: 1131 - protein, 122 aa, Synthetic construct
QVQLQESGPGLVKPSETLSLTCTVSGGSVSSGSYYWSWIRQPPGKGLEWIGYIYKSGFTNYNPSLKSRVTISVDTSKNQFSLKLSSVTAADTAVYYCAIGGRGYSYGPFDYWGQGTLVTVSS

SEQ ID NO: 1132 - protein, 121 aa, Synthetic construct
QVQLVQSGAEVKKPGASVKVSCKASGYTFTGYYLHWVRQAPGQGLEWMGWINPNSGDTNYVQNFQGRVTMTRDTSISTAYMELSRLRSDDTAVYYCARSYVDTSSSAFDIWGQGTMVTVSS

SEQ ID NO: 1133 - protein, 120 aa, Synthetic construct
QVQLQESGPGLVKPSETLSLTCTVSGGSISSYYWSWIRQPPGKGLEWIGYVYYSGYTKYNPSLKSRVTISVDTPKTQFSLKMSSVTAADTAVYYCASVESKWNYGPFDIWGQGTMVTVSS

SEQ ID NO: 1134 - protein, 124 aa, Synthetic construct
QVQLQESGPGLVKPSETLSLTCTVSGDSISSYYWSWIRQPPGKGLEWIGYIYYSGFTKYNPSLNSRVTISVDTSKSQFSLKLTSVTAADTAVYYCAMREPRGRYNWNYGPFDIWGQGTMVTVSS

SEQ ID NO: 1135 - protein, 117 aa, Synthetic construct
QVQLQESGPGLVKPSGTLSLTCAVSGGSISNDNWWSWVRQPPGKGLEWIGKIYHSEFTNYNPSLKSRVTISVDKSKNQFSLELNSVTAADTAVYYCAREYHNFMDVWCKGTTVTVSS

SEQ ID NO: 1136 - protein, 122 aa, Synthetic construct
QVQLQESGPGLVKPSETLSLTCTVSGDSVSSGKYFWSWIRQSPGKGLEWIGYIYYSGSTNYNPSLKNRVTISVDTSKKELSLKLSSVTAADTAVYYCARGGHNWNYAAFDIWGQGTMVTVSS

SEQ ID NO: 1137 - protein, 117 aa, Synthetic construct
QVQLQESGPGLVKPSGTLSLTCAVSGGSISNDNWWSWVRQSPGKGLEWIGKIYHSEFTNYNPSLKSRVTISVDKSKNQFSLELSSVAAADTAVYYCAREYENFMDVWGKGTTVTVSS

SEQ ID NO: 1138 - protein, 122 aa, Synthetic construct
QVQLQESGPGLVKPSGTLSLTCAVSGDSISSNSWWNWVRQPPGKGLEWIGQIFHSGHTNYNPSLKSRVTMSIDKSKNQFSLKLTSVTAADTALYYCARGGEYENSANWFDPWGQGTLVTVSS

SEQ ID NO: 1139 - protein, 122 aa, Synthetic construct
QVQLQESGPGLVKPSGTLSLTCAVSGVSINKDNWWTWVRQPPGKGLEWIGKIYHSGSTNYNPSLKSRVTISVDNSKNQFSLKLNSVTAADTAVYYCTRGGDIAMEGDWFAPWGQGTLVTVSS

SEQ ID NO: 1140 - protein, 120 aa, Synthetic construct
QVQLQESGPGLVKPSGTLSLTCAVSGGSISSDNWWNWVRQPPGKGLEWLGKIYHSGNTDYNPSLKSRVTISVDKSKNQFSLRLSSVTAADTAVYYCARGGTETTGYMDVWGKGTTVTVSS

SEQ ID NO: 1141 - protein, 122 aa, Synthetic construct
QVQLQESGPGLVKPSGTLSLTCAVSGGSISNDNWWSWVRQPPGKGLEWIGKIYHSGFTNYNPSLKSRVTISVDKSKNQFSLKLNSVTAADTAVYYCARGGDNFMEGEGLGTWGPGTLVTVSS

SEQ ID NO: 1142 - protein, 122 aa, Synthetic construct
QVQLQESGPGLVKPSGTLSLTCAVSGGSISNDNWWNWVRQSPGKGLEWIGKIYHSGFTDYNPSLKSRVTISVDKSKNQFSLKLSSVTAADTAVYYCARGNHNYLWIGYLGTWGPGTLVTVSS

SEQ ID NO: 1143 - protein, 119 aa, Synthetic construct
QVQLQESGPGLVKPSGTLSLICAVSGGSISSSNWWSWVRQPPGKGLEWIGRIYHSGHTNYNPSLKSRVTISVDKSKNQFSLKLTSVTAADTAVYYCARGRDLTGYFDYWGQGTLVTVSS

SEQ ID NO: 1144 - protein, 121 aa, Synthetic construct
QVQLQESGPGLVKPSGTLSLTCAVSGGSISNDNWWSWVRQSPGKGLEWIGKIYHSEFTNYNPSLKSRVTISVDKSKNQFSLELSSVTAADTAVYYCARGVDFWSGSHMDVWGKGTTVTVSS

SEQ ID NO: 1145 - protein, 119 aa, Synthetic construct
QVQLQESGPGLVKPSGTLSLTCAVSGGSISNDNWWSWVRQSPGKGLEWIGKIYHSEFTNYNPSLKSRVTISVDKSKNQFSLELSSVTAADTAVYFCAREGLELPHMDVWGKGTTVTVSS

SEQ ID NO: 1146 - protein, 117 aa, Synthetic construct
EVQLVESGGGVVKPGGSLRLSCAASGFTFSSYWMHWVRQAPGKGLVWVSRINSDGSSTSYADSVQGRFTISRDIAKNTLYLQMNSLRAEDTAVYYCARGQHLVQDYWGQGTLVTVSS

SEQ ID NO: 1147 - protein, 121 aa, Synthetic construct
QVQLVQSGAEVKNPGASVKVSCKASGYTFTGYYMHWVRQAPGQGLEWMGWINPNSGGTNYAQKFQGRVTMTRDTSISTAYMELSRLRSDDTAVYYCARERGDYDGDAFDIWGQGTMVTVSS

SEQ ID NO: 1148 - protein, 120 aa, Synthetic construct
EVQLVESGGGLVQPGGSLRLSCAASGFTFSNYYMNWVRQAPGKGLEWVANIKQDGSEKYYVDSVKGRFTISRDNAKNSLYLQMNSLRAEDTAVYYCARDGYYNFDAFDIWGQGTMVTVSS

SEQ ID NO: 1149 - protein, 121 aa, Synthetic construct
EVQLVESGGGLVQPGGSLRLSCAASGFTFSSYSMNWVRQAPGKGLEWVSSISSSSSYIYYADSVKGRFTISRDNAKNSLYLQMNSLRAEDTAVYYCAREGYDNWNSACDIWGQGTMVTVSS

SEQ ID NO: 1150 - protein, 121 aa, Synthetic construct
QITLKESGPTLVKPTQTLTLTCTFSGFSLSTSGVGVGWIRQPPGKALEWLALIYWNGDERYSPSLKSRLTITKDTSKNQVVLTMTNMDPVDTATYYCAHSPNWGYEAFDIWGQGTMVTVSS

SEQ ID NO: 1151 - protein, 121 aa, Synthetic construct
EVQLVESGGGLVPPGGSLRLSCAASGFTFSSYCMNWVRQAPGKGLEWVSSINSDSSYIYYADSVKGRFTISRDNAKNSLYLQMNSLRAEDTAVYYCAREGYYNWNGGNDYWGQGTLVTVSS

SEQ ID NO: 1152 - protein, 120 aa, Synthetic construct
EVQLVESGGGLVQPGGSLRLSCAASGFTFSSYWMHWVRQAPGKGLVWVSHINSDGSSTNYADSVKGRFTISRDNAKNTLYLQMNSLRSEDTAVYYCAREGYWNGDTFDIWGQGTMVTVSS

SEQ ID NO: 1153 - protein, 121 aa, Synthetic construct
EVQLVESGGGLVQPGGSLRLSCAASGFTFSAYDMHWVRQTPGKGLEWVSTIGTAGDTYYPDSVKGRFTISRDFARRSLYLHMNNLRAGDTAVYYCARGGSSSWYDWYFDLWGRGTLVTVSS

SEQ ID NO: 1154 - protein, 121 aa, Synthetic construct
QVQLQESGPGLVKPSGTLSLTCAVSGGSISSSTWWSWVRQPPGKGLEWIGEIYHSGSTNYNPSLKSRVTISLDKSKNQFSLKLSSVTAADTAVYYCAISLYNWNDAAFDIWGQGTMVTVSS

SEQ ID NO: 1155 - protein, 120 aa, Synthetic construct
QVQLVQSGSEVKKPGASVKVSCKTSGYTFTGYYMHWVRQAPGQGLEWMGWINPNSGGTTYAQKFQGRVTMTRDTSISTAYMELNRLRSDDTAVYYCAREAGGSGEYFQHWGQGTPVTVSS

SEQ ID NO: 1156 - protein, 121 aa, Synthetic construct
QITLKESGPTLVKPTQTLTLTCTFSGFSLSTSGVGVGWIRQPPGKALEWLALIYWNDVKFYSPSLQSRLTITKDTSKNQVVLTLTNMDPVDTATYYCAHGDNWNYRAFDIWGQGTMVTVSS

SEQ ID NO: 1157 - protein, 116 aa, Synthetic construct
QVQLVQSGAEVKKPGASVKVSCKASGYTFTSYGISWVRQAPGQGLEWMGWISAYNGNTHYAQNLQGRVTMTTDTSTSTAYMELRSLRSDDTAVYYCARSIAALDFWGQGTPVTVSS

SEQ ID NO: 1158 - protein, 121 aa, Synthetic construct
QVQLQESGPGLVKPSGTLSLTCAVSGGSISSNNWWSWVRQPPGKGLEWIGQIYHSENTNYNPSLKSRVTISVDKSKNQFSLKLSSVTAADTAIYYCARVDDWNYGGHFDYWGQGTLVTVSS

SEQ ID NO: 1159 - protein, 116 aa, Synthetic construct
QVQLVQSGAEVKKPGASVKVSCKASGYTFTGYGISWVRQAPGQGLEWMGWISAYNGNTHYAQNLQGRVTMTTDTSTNTAYMELRSLISDDTAFYYCARAGLGIDYWGQGTLVTVSS

SEQ ID NO: 1160 - protein, 120 aa, Synthetic construct
QVQLQESGPGLVKPSGTLSLTCAVSGGSISSSDWWSWVRQSPGKGLEWIGEIYHSGSTNYNPSLKSRVSISVDKSKNQFSLKLSSVTAADTAVYYCARGGHIGYYYMDVWGKGTTVTVSS

SEQ ID NO: 1161 - protein, 122 aa, Synthetic construct
EVQLVQSGAEVKKPGESLKISCKGSGYSFTNYWIGWVRQMPGKGLEWMGIIYPGDSDTIYSPSFQGQVTFSADKSINTAYLQWSSLKASDTAMYYCARGRGYSGYEGAFDIWGQGTMVTVSS

SEQ ID NO: 1162 - protein, 116 aa, Synthetic construct
QVQLVQSGAEVKKPGASVKVSCKASGYTFTNYGISWVRQAPGQGLEWMGWISAYNGNTHYAQKLQGRVTMTTDTSTSTAYMELRSLRSDDTAVYYCARAAAAVDYWGQGTLVTVSS

SEQ ID NO: 1163 - protein, 122 aa, Synthetic construct
QVQLQESGPGLVKPSETLSLSCTVSGGSVSSGSYYWSWIRQPPGKGLEWIGYIYYSGSTKYNPSLKSRVTISVDTSKNQVSLKLSSVTAADTAVYYCARDKGHWNYGAFDIWGQGTMVTVSS

SEQ ID NO: 1164 - protein, 122 aa, Synthetic construct
QVQLQESGPGLVKPSGTLSLTCAVSGGSISSNNWWSWVRQPPGKGLEWIGEIYHSGNINYNPSLKSRVTISVDKSKNQFSLKLSSVTAADTAVYYCARGGEYGDPVGYFDLWGRGTLVTVSS

SEQ ID NO: 1165 - protein, 119 aa, Synthetic construct
QVQLVQSGAEVKKPGASVKVSCKASGYTFTTYGISWVRQAPGQGLEWMGWISAYSGNTNYAQKLQGRVTMTTDTSTSTAYMELRSLRSDDTAVYYCARERVSNWVFDFWGQGTLVTVSS

SEQ ID NO: 1166 - protein, 120 aa, Synthetic construct
QVQLQESGPGLVKPSGTLSLTCAVSGGSISSSDWWSWVRQPPGKGLEWIGEIYHSRNTNYNPSLKSRVTISVDKSKNQFSLKLSSVTAADTAVYYCASGGVVADYYMDVWGKGTTVTVSS

SEQ ID NO: 1167 - protein, 123 aa, Synthetic construct
EVQLVESGGGLVKPGGSLRLSCAASGFTFSSYGMNWVRQAPGKGLEWVSSISGYGSYIYYAASVKGRFTISRDSAKNSLYLQMNSLSAEDTAVYYCARELGGIYYGVGYFDLWGRGTLVTVSS

SEQ ID NO: 1168 - protein, 122 aa, Synthetic construct
QVQLQESGPGLVKPSETLSLTCAVSGGSVSSGNYYWSWIRQPPGKGLEWIGYIYSSGSTNYNPSLKSRVTISIDTSKNQFSLKLSSVTAADTAVYYCARSPRGYSYGPFAYWGQGTLVTVSS

SEQ ID NO: 1169 - protein, 122 aa, Synthetic construct
QVQLQESGPGLVKPSQTLSLTCTVSGGSISSGGYNWNWIRQHPGKGLEWIGYINYSGNTYYNPSLKSRVTISVDTSKNQFSLKLSSVTAADTAVYYCARGPLDTAMAPFDYWGQGTLVTVSS

SEQ ID NO: 1170 - protein, 120 aa, Synthetic construct
QVQLQESGPGLVKPSETLSLTCTVSGDSISSYYWSWIRQPPGKGLEWIGYIYYSGFTKYNPSLKSRVTISVDTSKNQFSLRLSSVTAADTAVYYCASVDSKWNYGSFHIWGQGTMVTVSS

SEQ ID NO: 1171 - protein, 125 aa, Synthetic construct
QVQLQESGPGLVKPSETLSLTCSVSGDSVSNNRYYWSWIRQPPGKGLEWIGYIYYSGSTNYNPSLKSRVTISVDTSKNQLSLNLSSVTAADTAVYYCARDRPSRYKWNYDAFAIWGQGTMVTVSS

SEQ ID NO: 1172 - protein, 119 aa, Synthetic construct
QVQLQQWGAGLLKPSETLSLTCAVYGGSFSDYYWTWIRQPPGKGLEWIGEVNHIGSTNYNPSLKSRVTISVDTSKNQFSLNLSSVTAADTAVYYCAKYSTSWYGWFDPWGQGTLVTVSS

SEQ ID NO: 1173 - protein, 122 aa, Synthetic construct
QVQLQESGPGLVKPSGTLSLTCAVSGDSISSNNWWSWFRQPPGKGLEWIGRIYHSGTTNYNPSLESRVTISVDNSRNQFSLKLSSVTAADTAVYYCARGEEWELRGGVFDIWGQGTMVTVSS

SEQ ID NO: 1174 - protein, 116 aa, Synthetic construct
QVQLVQSGPELKKPGASVKVSCKASGYTFTNYAVNWVRQAPGQGLEWMGWINTNTGHPTYAQGFTGRFVFSLDTSVSTAYLQISSLKAEDTAVYYCARDSSSWGYWGQGTLVTVSS

SEQ ID NO: 1175 - protein, 119 aa, Synthetic construct
QVQLQESGPGLVTPSGTLSLTCAVSGDSISSDNWWSWVRQPPGKGLEWIGEIYHSENTNYNPSLKSRVTISVDKSKNQFSLRLNSVTAADTAMYYCARGRELTGLFDYWGQGTLVTVSS

SEQ ID NO: 1176 - protein, 120 aa, Synthetic construct
QVQLQESGPGLVKPSGTLSLTCAVSGGSISSNNWWSWVRQPPGKGLEWIGDIYHSGNTNYNPSLKSRVTLSVDMSKNQFSLKLNSVTAADTAVYYCARGGIAVTAYFDYWGQGTLVTVSS

SEQ ID NO: 1177 - protein, 122 aa, Synthetic construct
QVQLVQSGAEVKKPGASVKVSCKASGYTFTGYYLHWVRQAPGQGLEWMGWINPHSGGTIYAQKFQDRVTMTRDTSISTAYMELSRLRSDDTAVYYCANWNSGDSYYYYMDVWGKGTTVTVSS

SEQ ID NO: 1178 - protein, 121 aa, Synthetic construct
QVQLQESGPGLVKPSGTLSLTCAVSGGSISSDNWWNWVRQPPGKGLEWIGKIYHSGNTNYNPSLKSRVTISVDESKNQFSLRLYSVTAADTAVYYCARGVDFWSGSHMDVWGKGTTVTVSS

SEQ ID NO: 1179 - protein, 120 aa, Synthetic construct
QVQLQESGPGLVKPSGTLSLTCAVSGGSISSNNWWSWVRQAPGKGLEWIGKIYQSGSTMYNPSLKSRVTMSVDKSKNQFSLILSSVTAADTAVYYCARDKPPLLGAFDYWGQGTLVTVSS

SEQ ID NO: 1180 - protein, 120 aa, Synthetic construct
QVQLVESGGGVVQPGRSLRLSCAASGFTFSSYAMHWVRQAPGKGLEWVAVISYDGSNKYYADSVKGRFTISRDNSKNTLSLQMNSLRAEDTAVYYCAKRGGYSYGPFEHWGQGTLVTVSS

SEQ ID NO: 1181 - protein, 118 aa, Synthetic construct
QVQLVQSGSELKKPGASVKVSCKASGYTFTSYTMNWVRQAPGQGLEWVGWINTATGTPTYAQGFTGRYVFSLDTSVSTAYLQISGLKAEDTAVYFCARYSGSHSFDYWGQGTLVTVSS

SEQ ID NO: 1182 - protein, 119 aa, Synthetic construct
QVQLQESGPGLVKPSGTLSLTCAVSGGSISSDYWWSWVRQSPGKGLEWIGKIYHSGNTNHNPSLKSRVTISIDKSRNQFSLNLNSVTAADTAVYYCAREGLELPHMDVWGKGTTVTVSS

SEQ ID NO: 1183 - protein, 120 aa, Synthetic construct
QVQLVESGGGLVQPGRSLRLSCAASGFTFSSYAMHWVRQAPGKGLEWVTVISYDGSNKYYADSVKGRFTISRDNSKNTLYLQMNSLRAEDTAVYYCAKRGNWNYGPFHYWGQGTLVTVSS

SEQ ID NO: 1184 - protein, 115 aa, Synthetic construct
QVQLVESGGGVVQPGRSLRLSCAASGFTFSAYAIHWVRQAPGKGLEWVAVISYDGSNKKYADSVKGRFTISRDNSKNTLDLEMNSLRAEDTAVYYCAKGLPFDYWGQGTLVTVSS

SEQ ID NO: 1185 - protein, 118 aa, Synthetic construct
QVQLVQSGSDLKKPGASVKVSCKASGYTFTSYTMNWVRQAPGQGLEWMGWINTNTGTPTYAQGFTGRFVFSLDTSVSTAYLQISSLKAEDTAVYYCTRYTGNYSFDYWGQGTLVTVSS

SEQ ID NO: 1186 - protein, 125 aa, Synthetic construct
EVQLVESGGVLVQPGGSLRLSCAASGFTFRSYAMSWVRQAPGKGLEWVSAISGSGDSTYFADSVKGRFTISRDNSKNTLSLQMNSLRAEDTAVYYCASILGYCSGTSCYGLFDNWGQGTLVTVSS

SEQ ID NO: 1187 - protein, 117 aa, Synthetic construct
QVQLQESGPGLVKPSGTLSLTCAVSGGSISNDNWWSWVRQSPGKGLEWIGKIYHSEFTNYNPSLRSRVTISVDKSKNQFSLELTSVTAADTAVYYCAREYQNYMDVWGKGTTVTVSS

SEQ ID NO: 1188 - protein, 121 aa, Synthetic construct
QVQLQESGPGLVKPSGTLSLTCVVSGDSISSNNWWSWVRQPPGKGLEWIGQIYHSGITNYNPSLKSRVTISVDKSKNQFSLELTSVTAADAAVYYCARAQWELRAGWFDPWGQGTLVTVSS

SEQ ID NO: 1189 - protein, 119 aa, Synthetic construct
EVQLVESGGGLVKPGGTLTLSCAASGFTFSNAWMSWVRQAPGKGLEWVGRIKSKTDGGTTDYAAPVKGRFTISRDDSKNTLYLQMNSLKTEDTAVYYCTPRYNSDFDYWGQGTLVTVSS

SEQ ID NO: 1190 - protein, 120 aa, Synthetic construct
QVQLQESGPGLVKPSETLSLTCTVSGGSISSYYWSWIRQPPGKGLEWIGYIYYSGFTKYNPSLKSRVTISVDTSKNQFSLKLSSVTAADTAVYYCATHPRGYNYGPFDYWGQGTLVTVSS

SEQ ID NO: 1191 - protein, 121 aa, Synthetic construct
QVQLQESGPGLVKPSETLSLTCTVSGGSVNSGRYYWSWIRQPPGKGLEWIGYIYSSGYTNYNPSLKSRVTMLLDTSKNQFSLKLNSVTAADTAVYYCARSRGYRYGPFDYWGQGTLVTVSS

SEQ ID NO: 1192 - protein, 116 aa, Synthetic construct
QVQLVQSGSELKKPGASVKVSCEASGYTFTSYAMNWVRQAPGQGLEWMGWINTNTGTPTYAQGFTGRFVFSLDTSVSTAYLQISSLKAEDTAVYYCASHSTSFDYWGQGTLVTVSS

SEQ ID NO: 1193 - protein, 119 aa, Synthetic construct
QVQLQQWGAGLVKPSETLSLTCAVHGGSFSDYYLTWIRQPPGKGLEWIGEINHSGSTNYNPSLKSRVTLSIDTSKNQFSLKLSSVTAADTAVYYCARGSEDYYYYMDVWGKGTTVTVSS

SEQ ID NO: 1194 - protein, 121 aa, Synthetic construct
EVQLVQSGAEVKKPGESLKISCKGSGYIFTSYWIGWVRQMPGKGLEWMGIIYPGDSDTRYSPSFQGQVTISADKSIITAYLQWSSLKASDTAMYYCARHDYFDIGGYFDYWGQGTLVTVSS

SEQ ID NO: 1195 - protein, 117 aa, Synthetic construct
QVQLVQSGAEVKKPGASVKVSCKADGYTFTDYYMHWVRQAPGQGHEWMGWINPNSGVTYYAQKFQGRVTMTRDTSISTAYMELNRLRSDDTAVYYCARDRTFYFDYWGQGTLVTVSS

SEQ ID NO: 1196 - protein, 126 aa, Synthetic construct
QVQLVQSGAEVKKPGASVKVSCKASGYTFTDYYMHWVRQAPGQGLEWMGWINPNNGGTDYAQKFQGRVTMTRDTSISTAYMELHRLRSDDTAVYFCARGVYDVVVPTAIVNWFDPWGQGTLVTVSS

SEQ ID NO: 1197 - protein, 120 aa, Synthetic construct
QVQLQESGPGLVKPSGTLSLTCAVSGDSISNDYWWNWVRQPPGKGLEWIGEIYHSGHTNYNPSLKSRVTISVDKSKNQLSLKLTSVNAADTAVYYCARGGTEITGYMDVWGKGTTVTVSS

SEQ ID NO: 1198 - protein, 121 aa, Synthetic construct
QVQLQESGPGLVKPSGTLSLTCAVSGASIRSGHWWSWVRQPPGKGLEWIGEIYHSGNTNYNPSLKSRVTLSVDKSKNQFSLKLSSVTAADTAVYYCARGHYGDYVVYFDYWGQGTLVTVSS

SEQ ID NO: 1199 - protein, 120 aa, Synthetic construct
QVQLQESGPGLVKPSETLSLTCTVSGGSISSYYWSWIRQPPGKGLEWIGYVYYSGYTKYNPSLKSRVTISIDASKNQFSLKLTSVTAADTAVYYCATVESKWNYGPFAIWGQGTMVTVSS

SEQ ID NO: 1200 - protein, 123 aa, Synthetic construct
QVQLVQSGAEVKKPGASVKVSCKASGYTFTGYYMNWVRQAPGQGLEWMGWINPNSGATNYAQKFQGRVTMTRDTSISTDYMELSRLRSDDTAVYYCARDGAKWNHEGYYFDYWGQGTLVTVSS

SEQ ID NO: 1201 - DNA, 339 bp, Synthetic construct; identical to SEQ ID NO: 415
  source 1..339: mol_type = other DNA

SEQ ID NO: 1202 - DNA, 339 bp, Synthetic construct; identical to SEQ ID NO: 415
  source 1..339: mol_type = other DNA

SEQ ID NO: 1203 - DNA, 339 bp, Synthetic construct; identical to SEQ ID NO: 415
  source 1..339: mol_type = other DNA

SEQ ID NO: 1204 - DNA, 339 bp, Synthetic construct; identical to SEQ ID NO: 415
  source 1..339: mol_type = other DNA

SEQ ID NO: 1205 - DNA, 339 bp, Synthetic construct; identical to SEQ ID NO: 415
  source 1..339: mol_type = other DNA

SEQ ID NO: 1206 - DNA, 339 bp, Synthetic construct; identical to SEQ ID NO: 415
  source 1..339: mol_type = other DNA

SEQ ID NO: 1207 - DNA, 339 bp, Synthetic construct; identical to SEQ ID NO: 415
  source 1..339: mol_type = other DNA

SEQ ID NO: 1208 - DNA, 339 bp, Synthetic construct; identical to SEQ ID NO: 415
  source 1..339: mol_type = other DNA

SEQ ID NO: 1209 - DNA, 339 bp, Synthetic construct; identical to SEQ ID NO: 415
  source 1..339: mol_type = other DNA

SEQ ID NO: 1210 - DNA, 339 bp, Synthetic construct; identical to SEQ ID NO: 415
  source 1..339: mol_type = other DNA

SEQ ID NO: 1211 - DNA, 339 bp, Synthetic construct; identical to SEQ ID NO: 415
  source 1..339: mol_type = other DNA

SEQ ID NO: 1212 - DNA, 339 bp, Synthetic construct; identical to SEQ ID NO: 415
  source 1..339: mol_type = other DNA

SEQ ID NO: 1213 - DNA, 339 bp, Synthetic construct; identical to SEQ ID NO: 415
  source 1..339: mol_type = other DNA

SEQ ID NO: 1214 - DNA, 339 bp, Synthetic construct; identical to SEQ ID NO: 415
  source 1..339: mol_type = other DNA

SEQ ID NO: 1215 - DNA, 339 bp, Synthetic construct; identical to SEQ ID NO: 415
  source 1..339: mol_type = other DNA

SEQ ID NO: 1216 - DNA, 339 bp, Synthetic construct; identical to SEQ ID NO: 415
  source 1..339: mol_type = other DNA

SEQ ID NO: 1217 - DNA, 339 bp, Synthetic construct; identical to SEQ ID NO: 415
  source 1..339: mol_type = other DNA

SEQ ID NO: 1218 - DNA, 339 bp, Synthetic construct; identical to SEQ ID NO: 415
  source 1..339: mol_type = other DNA

SEQ ID NO: 1219 - DNA, 339 bp, Synthetic construct; identical to SEQ ID NO: 415
  source 1..339: mol_type = other DNA

SEQ ID NO: 1220 - DNA, 321 bp, Synthetic construct; identical to SEQ ID NO: 319
  source 1..321: mol_type = other DNA

SEQ ID NO: 1221 - DNA, 321 bp, Synthetic construct; identical to SEQ ID NO: 319
  source 1..321: mol_type = other DNA

SEQ ID NO: 1222 - DNA, 321 bp, Synthetic construct; identical to SEQ ID NO: 319
  source 1..321: mol_type = other DNA

SEQ ID NO: 1223 - DNA, 321 bp, Synthetic construct; identical to SEQ ID NO: 319
  source 1..321: mol_type = other DNA

SEQ ID NO: 1224 - DNA, 321 bp, Synthetic construct; identical to SEQ ID NO: 319
  source 1..321: mol_type = other DNA

SEQ ID NO: 1225 - DNA, 321 bp, Synthetic construct; identical to SEQ ID NO: 319
  source 1..321: mol_type = other DNA

SEQ ID NO: 1226 - DNA, 321 bp, Synthetic construct; identical to SEQ ID NO: 319
  source 1..321: mol_type = other DNA

SEQ ID NO: 1227 - DNA, 321 bp, Synthetic construct; identical to SEQ ID NO: 319
  source 1..321: mol_type = other DNA

SEQ ID NO: 1228 - DNA, 321 bp, Synthetic construct; identical to SEQ ID NO: 319
  source 1..321: mol_type = other DNA

SEQ ID NO: 1229 - DNA, 321 bp, Synthetic construct; identical to SEQ ID NO: 319
  source 1..321: mol_type = other DNA

SEQ ID NO: 1230 - DNA, 321 bp, Synthetic construct; identical to SEQ ID NO: 319
  source 1..321: mol_type = other DNA

SEQ ID NO: 1231 - DNA, 321 bp, Synthetic construct
  source 1..321: mol_type = other DNA
gccatccagatgacccagtctccatcctccctgtctgcatctgtaggagacagagtcaccatcacttgccgggcaagtcagggcattagaaatgatttaggctggtatcagcagaaaccagggaaagcccctaagctcctgatctatgctgcatccagtttacaaagtggggtcccatcaaggttcagcggcagtggatctggcacagatttcactctcaccatcagcagcctgcagcctgaagattttgcaacttattactgtctacaagattacaattacccgtggacgttcggccaagggaccaaggtggaaatcaaa

SEQ ID NO: 1232 - DNA, 339 bp, Synthetic construct
  source 1..339: mol_type = other DNA
gacatcgtgatgacccagtctccagactccctggctgtgtctctgggcgagagggccaccatcaactgcaagtccagccagactgttttgtacaggtccaacaataagaactacttagcttggtatcagcagaaaccaggacagcctcctaagctgctcatttactgggcatctacccgggaatccggggtccctgaccgattcagtggcagcgggtctgggacagatttcactctcaccatcagcagcctgcaggctgaagatgtggcagtttattactgtcagcaatattatagtactccgtggacgttcggccaagggaccaaggtggaaatcaaa

SEQ ID NO: 1233 - DNA, 321 bp, Synthetic construct
  source 1..321: mol_type = other DNA
gccatccagatgacccagtctccatcctccctgtctgcttctgtaggagacagagtcaccatcacttgccgggcaagtcagggcattagaaatgatttaggctggtatcagcagaatcccgggaaagcccctaagctcctgatttatgctgcatccaatttacaaagtggggtcccatcaaggttcagcggcagtggatctggcacagatttcactctcaccatcagcagcctgcagcctgaagattttgttacttattactgtctacaagattacaattggccgtggacgttcggccaagggacacgactggagattaaa

SEQ ID NO: 1234 - DNA, 321 bp, Synthetic construct
  source 1..321: mol_type = other DNA
gacatccagatgacccagtctccatcctccctgtctgcatctgtaggagacagagtcaccatcacttgccgggcaagtcagagcattagcaactatttaaattggtatcaacagaaaccagagaaagcccctaagttcctgatctatgctgcatccagtttgcaaagtggggtcccatcaaggttcagtggcagtggatctgggacagatttcactctcaccatcagcagtctgcaacctgaagattttgcaacttactactgtcaacagagttacagttccccgctcactttcggcggagggaccaaggtggagatcaaa

SEQ ID NO: 1235 - DNA, 321 bp, Synthetic construct
  source 1..321: mol_type = other DNA
gaaattgtgttgactcagtctccagactttcagtctgtgactccaaaggagaaagtcaccatcacctgccgggccagtcagagcattggtagtaacttacactggttccagcagaaaccagatcagtctccaaaactcctcatcaagtatgcttcccagtccttctcaggggtcccctcgaggttcagtggcagtggatctgggacagatttcaccctcaccatcaatagcctggaagctgaagatgctgcaatgtattactgtcatcagagtagtagtttacctcggacgttcggccaagggaccaaggtggaaatcaaa

SEQ ID NO: 1236 - DNA, 321 bp, Synthetic construct
  source 1..321: mol_type = other DNA
gccatccagatgacccagtctccatcctccctgtctgcatctgtaggagacagagtcaccatcacttgccgggcaagtcagggcattagaaatgatttaggctggtatcagcagaaaccagggaaagcccctaagctcctgatctatgctgcatccagtttacaaagtggggtcccatcaaggttcagcggcagtggatctggcacagatttcactctcaccatcagcagcctgcagcctgaagattttgcatcttattactgtctacaagattacaattggccgtacacttttggccaggggaccaagctggagatcaaa

SEQ ID NO: 1237 - DNA, 324 bp, Synthetic construct
  source 1..324: mol_type = other DNA
gaaattgtgttgacgcagtctccaggcaccctgtctttgtctccaggggaaagagccaccctctcctgcagggccagtcagagtgttagaagcagctactttgcctggtaccagcagaaacctggccaggctcccaggctcctcatctatggtgcatccagcagggccactggcatcccagacaggttcagtggcagtgggtctgggacagacttcactctcaccatcagcagactggagcctgaagattttgcagtgtattactgtcagcagtatggtagctcacctcggacgttcggccaagggaccaaggtggaaatcaaa

SEQ ID NO: 1238 - DNA, 339 bp, Synthetic construct
  source 1..339: mol_type = other DNA
gacatcgtgatgacccagtctccagactccctggctgtgtctctgggcgagagggccaccatcaactgcaagtccagccagagtgttttatacagctccaacaataagaactacttagcttggtaccagcagaaaccaggacagcctcctaagctgctcatttactgggcatctacccgggaatccggggtccctgaccgattcagtggcagcgggtctgggacagatttcactctcaccatcagcagcctgcaggctgaagatgtggcagtttattactgtcagcaatattttggtactcctcggacgttcggccaagggaccaaggtggaaatcaaa

SEQ ID NO: 1239 - DNA, 321 bp, Synthetic construct
  source 1..321: mol_type = other DNA
gaaattgtgttgacacagtctccagccaccctgtctttgtctccaggggaaagagccaccctctcctgcagggccagtcagagtgttagcagctacttagcctggtaccaacagaaacctggccaggctcccaggctcctcatctatgatgcatccaacagggccactggcatcccagccaggttcagtggcagtgggtctgggacagacttcactctcaccatcagcagcctgcagtctgaagattttgcagtttattactgtcagcagcgtagcaattggccgctcactttcggcggagggaccaaggtggagatcaaa

SEQ ID NO: 1240 - DNA, 321 bp, Synthetic construct
  source 1..321: mol_type = other DNA
gacatccagatgacccagtctccatcctccctgtctgcatctgtaggagacagagtcaccatcacttgccgggcaagtcagaccattaggagctatttaaattggtatcagcagaaaccagggaaagcccctaagctcctgatctatgctgcatccagtttgcaaagtggggtcccatcaaggttcagtggcagtggatctgggacaaatttcactctcaccatcagcagtctgcaacctgaagattttgcaacttactcctgtcaacagagttacactaccccgctcactttcggcggagggaccaaggtggagatcaaa

SEQ ID NO: 1241 - DNA, 324 bp, Synthetic construct
  source 1..324: mol_type = other DNA
gaaattgtgttgacgcagtctccaggcaccctgtctttgtctccaggggaaagagccaccctctcctgcagggccagtcagagtattagcagcagctacttagcctggtaccagcgggaacctggccaggctcccaggctcctcatctatggtgcatccagcagggccactggcatcccagacaggttcagtggcagtgggtctgggacagacttcactctcaccatcagcagactggagcctgaagattttgtagtgtattactgtcaacaatatggtagctcaccgatcaccttcggccaagggacacgactggagattaaa

SEQ ID NO: 1242 - DNA, 324 bp, Synthetic construct
  source 1..324: mol_type = other DNA
gaaattgtgttgacgcagtctccaggcaccctgtctttgtctccaggggaaagagccaccctctcctgcagggccagtcagagtgttcgcagcagctacttagcctggtaccagcagaaacctggccaggctcccaggctcctcatctatggtgcatccagcagggccactggcatcccagacaggttcagtggcagtgggtctgggacagacttcactctcaccttcagcagactggagcctgaagattttgcagtgtattactgtcagcagtatggtagctcaccgtacacttttggccaggggaccaagctggagatcaaa

SEQ ID NO: 1243 - DNA, 321 bp, Synthetic construct
  source 1..321: mol_type = other DNA
gacatccagatgacccagtctccatcctccctgtctgcatctgtaggagacagagtcaccatcacttgccaggcgagtcaggacattagcaactatttaaattggtatcagcagaaaccagggaaagcccctaagctcctgatctacgatgcatccaatttggaaacaggggtcccatcaaggttcagtggaagtggatctgggacagattttactttcaccatcagcagcctgcagcctgaagattttgcaacttactattgtcaacaggctaacagtttcccgctcactttcggcggagggaccaaggtggagatcaaa

SEQ ID NO: 1244 - DNA, 324 bp, Synthetic construct
  source 1..324: mol_type = other DNA
gaaattgtgttgacgcagtctccaggcaccctgtctttgtctccaggggaaagagccaccctctcctgcagggccagtcagagtgttagcagcagctacttagcctggtaccagcagaaacctggccaggctcccaggctcctcatctatggtgcatccagcagggccactggcatcccagacaggttcagtggcagtgggtctgggacagacttcactctcaccatcagcagactggagcctgaagattttgcagtgtattactgtcagcagtatggtagctcaccattcactttcggccctgggaccaaagtggatatcaaa

SEQ ID NO: 1245 - DNA, 339 bp, Synthetic construct
  source 1..339: mol_type = other DNA
gacatcgtgatgacccagtctccagactccctggctgtgtctctgggcgagagggccaccatcaactgcaagtccagccagagtgttttatacagctccaacaataagaactacttagcttggtaccagcagaaaccaggacagcctcctaagctgctcatttactgggcatctacccgggaatccggggtccctgaccgattcagtggcagcgggtctgggacagatttcactctcaccatcagcagcctgcaggctgaagatgtggcagtttattactgtcagcaatattatagtactccgtggacgttcggccaagggacacgactggagattaaa

SEQ ID NO: 1246 - DNA, 318 bp, Synthetic construct
  source 1..318: mol_type = other DNA
gacatccagatgacccagtctccatcctccctgtctgcatctgtaggagacagagtcaccatcacttgccgggcgagtcaggacattagcaactatttaaattggtatcagcagaaaccagggaaagcccctaagctcctgatctatgctgcatccagtttggaaagtggggtcccatcaaggttcagtggcagtggatctgggacagatttcactctcaccatcagcagtctgcaacctgaagattttgcaacttactactgtcaacagagttacagtacccctactttcggcggagggaccaaggtggagatcaaa

SEQ ID NO: 1247 - DNA, 339 bp, Synthetic construct
  source 1..339: mol_type = other DNA
gacatcgtgatgacccagtctccagactccctggctgtgtctctgggcgagagggccaccatcaactgcaagtccagccagagtgttttatacaggtccaacaataagaactacttagcttggtaccagcagaaaccaggccagcctcctaaactgctcatttactgggcatctacccgggaatccggggtccctgaccgattcagtggcagcgggtctgggacagatttcactctcaccatcagcagcctgcaggctgaagatgtggcagtttattactgtcagcaatattatggtactcctcggacgttcggccaagggaccaaggtggaaatcaaa

SEQ ID NO: 1248 - DNA, 321 bp, Synthetic construct
  source 1..321: mol_type = other DNA
gacatccagatgacccagtctccatcctccctgtctgcatctgtaggagacagagtcaccatcacttgccaggcgagtcaggacattaagaactgtttaaattggtatcagcagaaaccagggaaagcccctaagctcctgatctacgatgcatccaatttggaaacaggggtcccatcaaggttcagtggaagtggatctgggacagattttactttcaccatcagcagcctgcagcctgaagatattgcaacatattactgtcaacagtttgataatctccctctcactttcggcggagggaccaaggtggagatcaaa

SEQ ID NO: 1249 - DNA, 336 bp, Synthetic construct
  source 1..336: mol_type = other DNA
gacatcgtgatgacccagtctccagactccctggctgtgtctctgggcgagagggccaccatcaactgcaagtccagccagactattttatacaggtccaacattaagaactacttagcttggtaccagcagaaaccaggacagcctcctaaactgctcatttcctgggcatctacccgggaatccggggtccctgaccgattcagtggcagcgggtctgggacagatttcactctcaccatcagcagcctgcaggctgaagatgtggcagtttattactgtcagcaatattatagtactcggacgttcggccaggggaccaagctggagatcaaa

SEQ ID NO: 1250 - DNA, 339 bp, Synthetic construct
  source 1..339: mol_type = other DNA
gacatcgtgatgacccagtctccagactccctggctgtgtctctgggcgagagggccaccatcaactgcaagtccagccagagtgttttatacagctccaacaataagaactacttagcttggtaccagcagaaaccaggacagcctcctaagctgctcatttactgggcatctacccgggaatccggggtccctgaccgattcagtggcagcgggtctgggacagatttcactctcaccatcagcagcctgcaggctgaagatgtggcagtttattactgtcagcaatattatagtactcctcggacgttcggccaagggaccaaggtggaaatcaaa

SEQ ID NO: 1251 - DNA, 321 bp, Synthetic construct
  source 1..321: mol_type = other DNA
gacatccagatgacccagtctccttccaccctgtctgcatctgtaggagacagagtcactatcacttgtcgggcgagtcagggtattagcagctggttagcctggtatcagcagaaaccagggaaagcccctaaactcctgatctatgctgcatccagtttgcagagtggggtcccatcaaggttcagcggcagtggatctgggacagatttcactctcaccatcagcagcctgcagcctgaagattttgcaacttactattgtcaacaggctaacagtttccctctcactttcggcggagggaccaaggtggagatcaaa

SEQ ID NO: 1252 - DNA, 339 bp, Synthetic construct
  source 1..339: mol_type = other DNA
gacatcgtgatgacccagtctccagactccctggctgtgtctctgggcgagagggccaccatcaactgcaagtccagccagagtgttttatacagctccaacaataagaactacttagcttggtaccagcagaaaccaggacagcctcctaagctgctcatttactgggcatctacccgggaatccggggtccctgaccgattcagtggcagcgggtctgggacagatttcactctcaccatcagcagcctgcaggctgaagatgtggcagtttattactgtcagcaatattatagtactcctccgacgttcggccaagggaccaaggtggaaatcaaa

SEQ ID NO: 1253 - DNA, 321 bp, Synthetic construct
  source 1..321: mol_type = other DNA
gacatccagatgacccagtctccatcctccctgtctgcatctgtaggagacagagtcaccatcacttgccgggcaagtcagagcattagcagctatttaaattggtatcagcagaaaccagggaaagcccctaagctcctgatctatgctgcatccagtttgcaaagtggggtcccatcaaggttcagtggcagtggatctgggacagatttcactctcaccatcagcagtctgcaacctgaagattttgcaacttactactgtcaacagagttacagtaccccgtacacttttggccaggggaccaagctggagatcaaa

SEQ ID NO: 1254 - DNA, 339 bp, Synthetic construct
  source 1..339: mol_type = other DNA
gacatcgtgatgacccagtctccagactccctggctgtgtctctgggcgagagggccaccatcaactgcaagtccagccagagtgttttatacagctccaacaataagaactacttagcttggtaccagcagaaaccaggacagcctcctaagctgctcatttactgggcatctacccgggaatccggggtccctgaccgattcagtggcagcgggtctgggacagatttcactctcaccatcagcagcctgcaggctgaagatgtggcagtttattactgtcagcaattttatgatactcctcggacgttcggccaagggaccaaggtggaaatcaaa

SEQ ID NO: 1255 - DNA, 321 bp, Synthetic construct
  source 1..321: mol_type = other DNA
gacatccagatgacccagtctccatcctccctgtctgcatctgtaggagacagagtcaccatcacttgccgggcgagtcagggcattagcaattatttagcctggtatcagcagaaaccagggaaagttcctaagctcctgatctatgttgcatccactttgcaatcaggggtcccatctcggttcagtggcagtggatctgggacagatttcactctcaccatcagcagcctgcagcctgaagatgttgcaacttattactgtcaaaattatatcagtgccccgctcactttcggcggagggaccaaggtggagatcaaa

SEQ ID NO: 1256 - DNA, 339 bp, Synthetic construct
  source 1..339: mol_type = other DNA
gacatcgtgatgacccagtctccagactccctggctgtgtctctgggcgagagggccaccatcaactgcaagtccagccagagtgttttatacagctccaacaataagaactacttagcttggtaccagcagaaaccaggacagcctcctaagctgctcatttactgggcatctacccgggaatccggggtccctgaccgattcagtggcagcgggtctgggacagatttcactctcaccatcagcagcctgcaggctgaagatgtggcagtttattactgtcagcaatattatagtactccgtggacgttcggccaagggaccaaggtggaaatcaaa

SEQ ID NO: 1257 - DNA, 324 bp, Synthetic construct
  source 1..324: mol_type = other DNA
gaaattgtgttgacgcagtctccaggcaccctgtctttgtctccaggggaaagagccaccctctcctgcagggccagtcagagtgttagcagcagctacttagcctggtaccagcagaaacctggccaggctcccaggctcctcatctatggtgcatccagcagggccactggcatcccagacaggttcagtggcagtgggtctgggacagacttcactctcaccatcagcagactggagcctgaagattttgcagtgtattactgtcagcagtatggtagctcaccgtacacttttggccaggggaccaagctggagatcaaa

SEQ ID NO: 1258 - DNA, 321 bp, Synthetic construct
  source 1..321: mol_type = other DNA
gacatccagatgacccagtctccatcctccctgtctgcatctgtaggagacagagtcaacatcacttgccgggcgagtcagggcattagcaattatttagcctggtatcagcagaaaccagggaaagttcctaagctcctgatctatgctgcatccactttgcaatcaggggtcccatctcgtttcagtggcagtggatctgggacagatttcactctcaccatcagcagcctgcagcctgaagatgttgcaagttatttctgtcaaaaatatatcagtgccccgctcactttcggcggagggaccaaggtggagatcaaa

SEQ ID NO: 1259 - DNA, 321 bp, Synthetic construct
  source 1..321: mol_type = other DNA
gacatccagatgacccagtctccatcctccctgtctgcatctgtaggagacagagtcaccatcacttgccgggcgagtcagggcattagcaattatttagcctggtatcagcagaaaccagggaaagttcctaagctcctgatctatgctgcatccactttgcaatcaggggtcccatctcggttcagtggcagtggatctgggacagatttcactctcaccatcagcagcctgcagcctgaagacgttgcaagttattactgtcaagattataccagtgccccgctcactttcggcggagggaccaaggtggagatcaaa

SEQ ID NO: 1260 - DNA, 324 bp, Synthetic construct
  source 1..324: mol_type = other DNA
gaaattgtgttgacgcagtctccaggcaccctgtctttgtctccaggggaaagagccaccctctcctgcagggccagtcagagtgttagtgacagctacttagcctggtaccagcaggaacctggccaggcgcccaggctcctcatctatggtgcatccagcagggccactggcatcccagacaggttcagtggcagtgggtctgggacagacttcactctcaccatcagcagactggagcctgaagattttgcattatattactgtcagcaatatgattcctcgccattcactttcggccctgggaccaaagtggatatcaaa

SEQ ID NO: 1261 - DNA, 339 bp, Synthetic construct; identical to SEQ ID NO: 414
  source 1..339: mol_type = other DNA

SEQ ID NO: 1262 - DNA, 339 bp, Synthetic construct; identical to SEQ ID NO: 415
  source 1..339: mol_type = other DNA

SEQ ID NO: 1263 - DNA, 339 bp, Synthetic construct; identical to SEQ ID NO: 415
  source 1..339: mol_type = other DNA

SEQ ID NO: 1264 - DNA, 339 bp, Synthetic construct; identical to SEQ ID NO: 415
  source 1..339: mol_type = other DNA

SEQ ID NO: 1265 - DNA, 339 bp, Synthetic construct; identical to SEQ ID NO: 415
  source 1..339: mol_type = other DNA

SEQ ID NO: 1266 - DNA, 321 bp, Synthetic construct
  source 1..321: mol_type = other DNA
gacatccagatgacccagtctccatcctccctgtctgcatctgtaggagacagagtcaccatcacctgccgggcaagtcagaccattagaaactttttaaattggtatcagcggaaaccagggaaagcccctaagatcctgatctatgctgcatccagtttgcaaagtggggtcccatcaaggttcagtggcagtggatctgggacagatttcactctcaccatcagcagtctgcaacctgcagattttgcaacttactactgtcaacagacttacagtatcccgatcaccttcggccaagggacacgactggagattaaa

SEQ ID NO: 1267 - DNA, 321 bp, Synthetic construct
  source 1..321: mol_type = other DNA
gacatccagatgacccagtctccatcctccctgtctgcatctgtaggagacagagtcaccatcacttgccgggcaagtcagagcattagcaggtatttaaattggtatcagcagaaaccagggaaagcccctaaactcctgctctatgctgcatccagtttgcaaagtggggtcccatcaaagttcagcggcagtggatctgggacagatttcactctcaccatcagcagcctgcaacctgaagattttgcaacttactactgtcaacagagttacagttccccgatcaccttcggccaagggacacgactggagattaaa

SEQ ID NO: 1268 - DNA, 336 bp, Synthetic construct
  source 1..336: mol_type = other DNA
gatattgtgatgactcagtctccactctccctgcccgtcacccctggagagccggcctccatctcctgcaggtctagtcagagcctcctgcatagtaatggatacaactatttggattggtacctgcagaagccagggcagtctccacagctcctgatctatttgggttctaatcgggcctccggggtccctgacaggttcagtggcagtggatcaggcacagattttacactgaaaatcagcagagtggaggctgaggatgttggggtttattactgcatgcaaactctacaaactcctccgacgttcggccaagggaccaaggtggaaatcaaa

SEQ ID NO: 1269 - DNA, 321 bp, Synthetic construct
  source 1..321: mol_type = other DNA
gacatccagttgacccagtctccatccttcctgtctgcatctgtaggagacagactcaccatcacttgccgggccagtcagggcattagcagttatttagcctggtatcagcaaaaaccagggaaagcccctaagctcctgatctatactgcatccactttacaaagtggggtcccatcaaggttcagcggcagtggatctgggacagaattcactctcacaatcagcagcctgcagcctgaagattttgcaacttattactgtcaacagcttaatggttaccctccgacgttcggccaagggaccaaggtggaaatcaaa

SEQ ID NO: 1270 - DNA, 321 bp, Synthetic construct
  source 1..321: mol_type = other DNA
gacatccagatgacccagtctccatcctccctgtctgcatctgtaggagacagagtcaccatcacttgccgggcaagtcagagcattaccagctatttaaattggtatcagcagaaaccagggaaagcccctaagctcctgatctttgctgcatccagtttgcaaagtggggtcccatcaaggttcagtggcagtggatctgggacagatttcactctcaccatcagcagtctgcaacctgaagattttgcaacttactactgtcaacagagttacagtacccctctcactttcggcggagggaccaaggtggagatcaaa

SEQ ID NO: 1271 - DNA, 339 bp, Synthetic construct
  source 1..339: mol_type = other DNA
gacatcgtgatgacccagtctccagactccctggctgtgtctctgggcgagagggccaccatcaactgcaagtccagccagagtgttttatacagctccaacaataagaactacttagcttggtaccagcagaaaccaggacagcctcctaagctgctcatttactgggcatctacccgggaatccggggtccctgaccgattcagtggcagcgggtctgggacagatttcactctcaccatcagcagcctgcaggctgaagatgtggcagtttattactgtcagcaatattatagtactcctcggacgttcggccaggggaccaaggtggaaatcaaa

SEQ ID NO: 1272 - DNA, 321 bp, Synthetic construct
  source 1..321: mol_type = other DNA
gacatccagatgacccagtctccatcctccctgtctgcatctgtaggagaaagagtcaccatcacttgccgggcaagtcagagcattagcagctatttaaattggtatcagcagaaaccagggaaagcccctaacctcctgatctatgctgcatccagtttccaaagtggggtcccatcaagggtcagtggcagtggatctgggacagatttcactctcaccatcagcagtctgcaacctgaggattttgcaacttactactgtcaacagagttacagtaacccgtacacttttggccaggggaccaagctggagatcaaa

SEQ ID NO: 1273 - DNA, 324 bp, Synthetic construct
  source 1..324: mol_type = other DNA
gaaattgtgttgacgcagtctccaggcaccctgtctttgtctccaggggaaagagccaccctctcctgcagggccagtcagagtgttagtagaagctacttagcctggtaccagcagaaacctggccaggctcccaggctcctcatctatggtgcatccagcagggccactggcatcccagacaggttcagtggcagtgggtctgggacagacttcactctcaccatcagcagactggagcctgaagattttgcagtgtattactgtcagcagtatggtagctcaccgtggacgttcggccaagggaccaaggtggaaatcaaa

SEQ ID NO: 1274 - DNA, 336 bp, Synthetic construct
  source 1..336: mol_type = other DNA
gatattgtgatgactcagtctccactctccctgcccgtcacccctggagagccggcctccatctcctgcaggtctagtcagatcctcctgcatactaatggatacaactatttggattggtacctgcagaagccagggcagtctcctcagctcctgatctatttgggttcttatcgggcctccggggtccctgacaggttcagtggcagtggatcaggcacagattttacactgaaaatcagcagagtggaggctggggatgttgggctttattactgcatgcaagctctacaaactccgctcactttcggcggagggaccaaggtggagatcaaa

SEQ ID NO: 1275 - protein, 113 aa, Synthetic construct; identical to SEQ ID NO: 402

SEQ ID NO: 1276 - protein, 113 aa, Synthetic construct; identical to SEQ ID NO: 402

SEQ ID NO: 1277 - protein, 113 aa, Synthetic construct; identical to SEQ ID NO: 402

SEQ ID NO: 1278 - protein, 113 aa, Synthetic construct; identical to SEQ ID NO: 402

SEQ ID NO: 1279 - protein, 113 aa, Synthetic construct; identical to SEQ ID NO: 402

SEQ ID NO: 1280 - protein, 113 aa, Synthetic construct; identical to SEQ ID NO: 402

SEQ ID NO: 1281 - protein, 113 aa, Synthetic construct; identical to SEQ ID NO: 402

SEQ ID NO: 1282 - protein, 113 aa, Synthetic construct; identical to SEQ ID NO: 402

SEQ ID NO: 1283 - protein, 113 aa, Synthetic construct; identical to SEQ ID NO: 402

SEQ ID NO: 1284 - protein, 113 aa, Synthetic construct; identical to SEQ ID NO: 402

SEQ ID NO: 1285 - protein, 113 aa, Synthetic construct; identical to SEQ ID NO: 402

SEQ ID NO: 1286 - protein, 113 aa, Synthetic construct; identical to SEQ ID NO: 402

SEQ ID NO: 1287 - protein, 113 aa, Synthetic construct; identical to SEQ ID NO: 402

SEQ ID NO: 1288 - protein, 113 aa, Synthetic construct; identical to SEQ ID NO: 402

SEQ ID NO: 1289 - protein, 113 aa, Synthetic construct; identical to SEQ ID NO: 402

SEQ ID NO: 1290 - protein, 113 aa, Synthetic construct; identical to SEQ ID NO: 402

SEQ ID NO: 1291 - protein, 113 aa, Synthetic construct; identical to SEQ ID NO: 402

SEQ ID NO: 1292 - protein, 113 aa, Synthetic construct; identical to SEQ ID NO: 402

SEQ ID NO: 1293 - protein, 113 aa, Synthetic construct; identical to SEQ ID NO: 402

SEQ ID NO: 1294 - protein, 107 aa, Synthetic construct; identical to SEQ ID NO: 309

SEQ ID NO: 1295 - protein, 107 aa, Synthetic construct; identical to SEQ ID NO: 309

SEQ ID NO: 1296 - protein, 107 aa, Synthetic construct; identical to SEQ ID NO: 309

SEQ ID NO: 1297 - protein, 107 aa, Synthetic construct; identical to SEQ ID NO: 309

SEQ ID NO: 1298 - protein, 107 aa, Synthetic construct; identical to SEQ ID NO: 309

SEQ ID NO: 1299 - protein, 107 aa, Synthetic construct; identical to SEQ ID NO: 309

SEQ ID NO: 1300 - protein, 107 aa, Synthetic construct; identical to SEQ ID NO: 309

SEQ ID NO: 1301 - protein, 107 aa, Synthetic construct; identical to SEQ ID NO: 309

SEQ ID NO: 1302 - protein, 107 aa, Synthetic construct; identical to SEQ ID NO: 309

SEQ ID NO: 1303 - protein, 107 aa, Synthetic construct; identical to SEQ ID NO: 309

SEQ ID NO: 1304 - protein, 107 aa, Synthetic construct; identical to SEQ ID NO: 309

SEQ ID NO: 1305 - protein, 107 aa, Synthetic construct
AIQMTQSPSSLSASVGDRVTITCRASQGIRNDLGWYQQKPGKAPKLLIYAASSLQSGVPSRFSGSGSGTDFTLTISSLQPEDFATYYCLQDYNYPWTFGQGTKVEIK

SEQ ID NO: 1306 - protein, 113 aa, Synthetic construct
DIVMTQSPDSLAVSLGERATINCKSSQTVLYRSNNKNYLAWYQQKPGQPPKLLIYWASTRESGVPDRFSGSGSGTDFTLTISSLQAEDVAVYYCQQYYSTPWTFGQGTKVEIK

SEQ ID NO: 1307 - protein, 107 aa, Synthetic construct
AIQMTQSPSSLSASVGDRVTITCRASQGIRNDLGWYQQNPGKAPKLLIYAASNLQSGVPSRFSGSGSGTDFTLTISSLQPEDFVTYYCLQDYNWPWTFGQGTRLEIK

SEQ ID NO: 1308 - protein, 107 aa, Synthetic construct
DIQMTQSPSSLSASVGDRVTITCRASQSISNYLNWYQQKPEKAPKFLIYAASSLQSGVPSRFSGSGSGTDFTLTISSLQPEDFATYYCQQSYSSPLTFGGGTKVEIK

SEQ ID NO: 1309 - protein, 107 aa, Synthetic construct
EIVLTQSPDFQSVTPKEKVTITCRASQSIGSNLHWFQQKPDQSPKLLIKYASQSFSGVPSRFSGSGSGTDFTLTINSLEAEDAAMYYCHQSSSLPRTFGQGTKVEIK

SEQ ID NO: 1310 - protein, 107 aa, Synthetic construct
AIQMTQSPSSLSASVGDRVTITCRASQGIRNDLGWYQQKPGKAPKLLIYAASSLQSGVPSRFSGSGSGTDFTLTISSLQPEDFASYYCLQDYNWPYTFGQGTKLEIK

SEQ ID NO: 1311 - protein, 108 aa, Synthetic construct
EIVLTQSPGTLSLSPGERATLSCRASQSVRSSYFAWYQQKPGQAPRLLIYGASSRATGIPDRFSGSGSGTDFTLTISRLEPEDFAVYYCQQYGSSPRTFGQGTKVEIK

SEQ ID NO: 1312 - protein, 113 aa, Synthetic construct
DIVMTQSPDSLAVSLGERATINCKSSQSVLYSSNNKNYLAWYQQKPGQPPKLLIYWASTRESGVPDRFSGSGSGTDFTLTISSLQAEDVAVYYCQQYFGTPRTFGQGTKVEIK

SEQ ID NO: 1313 - protein, 107 aa, Synthetic construct
EIVLTQSPATLSLSPGERATLSCRASQSVSSYLAWYQQKPGQAPRLLIYDASNRATGIPARFSGSGSGTDFTLTISSLQSEDFAVYYCQQRSNWPLTFGGGTKVEIK

SEQ ID NO: 1314 - protein, 107 aa, Synthetic construct
DIQMTQSPSSLSASVGDRVTITCRASQTIRSYLNWYQQKPGKAPKLLIYAASSLQSGVPSRFSGSGSGTNFTLTISSLQPEDFATYSCQQSYTTPLTFGGGTKVEIK

SEQ ID NO: 1315 - protein, 108 aa, Synthetic construct
EIVLTQSPGTLSLSPGERATLSCRASQSISSSYLAWYQREPGQAPRLLIYGASSRATGIPDRFSGSGSGTDFTLTISRLEPEDFVVYYCQQYGSSPITFGQGTRLEIK

SEQ ID NO: 1316 - protein, 108 aa, Synthetic construct
EIVLTQSPGTLSLSPGERATLSCRASQSVRSSYLAWYQQKPGQAPRLLIYGASSRATGIPDRFSGSGSGTDFTLTFSRLEPEDFAVYYCQQYGSSPYTFGQGTKLEIK

SEQ ID NO: 1317 - protein, 107 aa, Synthetic construct
DIQMTQSPSSLSASVGDRVTITCQASQDISNYLNWYQQKPGKAPKLLIYDASNLETGVPSRFSGSGSGTDFTFTISSLQPEDFATYYCQQANSFPLTFGGGTKVEIK

SEQ ID NO: 1318 - protein, 108 aa, Synthetic construct
EIVLTQSPGTLSLSPGERATLSCRASQSVSSSYLAWYQQKPGQAPRLLIYGASSRATGIPDRFSGSGSGTDFTLTISRLEPEDFAVYYCQQYGSSPFTFGPGTKVDIK

SEQ ID NO: 1319 - protein, 113 aa, Synthetic construct
DIVMTQSPDSLAVSLGERATINCKSSQSVLYSSNNKNYLAWYQQKPGQPPKLLIYWASTRESGVPDRFSGSGSGTDFTLTISSLQAEDVAVYYCQQYYSTPWTFGQGTRLEIK

SEQ ID NO: 1320 - protein, 106 aa, Synthetic construct
DIQMTQSPSSLSASVGDRVTITCRASQDISNYLNWYQQKPGKAPKLLIYAASSLESGVPSRFSGSGSGTDFTLTISSLQPEDFATYYCQQSYSTPTFGGGTKVEIK

SEQ ID NO: 1321 - protein, 113 aa, Synthetic construct
DIVMTQSPDSLAVSLGERATINCKSSQSVLYRSNNKNYLAWYQQKPGQPPKLLIYWASTRESGVPDRFSGSGSGTDFTLTISSLQAEDVAVYYCQQYYGTPRTFGQGTKVEIK

SEQ ID NO: 1322 - protein, 107 aa, Synthetic construct
DIQMTQSPSSLSASVGDRVTITCQASQDIKNCLNWYQQKPGKAPKLLIYDASNLETGVPSRFSGSGSGTDFTFTISSLQPEDIATYYCQQFDNLPLTFGGGTKVEIK

SEQ ID NO: 1323 - protein, 112 aa, Synthetic construct
DIVMTQSPDSLAVSLGERATINCKSSQTILYRSNIKNYLAWYQQKPGQPPKLLISWASTRESGVPDRFSGSGSGTDFTLTISSLQAEDVAVYYCQQYYSTRTFGQGTKLEIK

SEQ ID NO: 1324 - protein, 113 aa, Synthetic construct
DIVMTQSPDSLAVSLGERATINCKSSQSVLYSSNNKNYLAWYQQKPGQPPKLLIYWASTRESGVPDRFSGSGSGTDFTLTISSLQAEDVAVYYCQQYYSTPRTFGQGTKVEIK

SEQ ID NO: 1325 - protein, 107 aa, Synthetic construct
DIQMTQSPSTLSASVGDRVTITCRASQGISSWLAWYQQKPGKAPKLLIYAASSLQSGVPSRFSGSGSGTDFTLTISSLQPEDFATYYCQQANSFPLTFGGGTKVEIK

SEQ ID NO: 1326 - protein, 113 aa, Synthetic construct
DIVMTQSPDSLAVSLGERATINCKSSQSVLYSSNNKNYLAWYQQKPGQPPKLLIYWASTRESGVPDRFSGSGSGTDFTLTISSLQAEDVAVYYCQQYYSTPPTFGQGTKVEIK

SEQ ID NO: 1327 - protein, 107 aa, Synthetic construct
DIQMTQSPSSLSASVGDRVTITCRASQSISSYLNWYQQKPGKAPKLLIYAASSLQSGVPSRFSGSGSGTDFTLTISSLQPEDFATYYCQQSYSTPYTFGQGTKLEIK

SEQ ID NO: 1328 - protein, 113 aa, Synthetic construct
DIVMTQSPDSLAVSLGERATINCKSSQSVLYSSNNKNYLAWYQQKPGQPPKLLIYWASTRESGVPDRFSGSGSGTDFTLTISSLQAEDVAVYYCQQFYDTPRTFGQGTKVEIK

SEQ ID NO: 1329 - protein, 107 aa, Synthetic construct
DIQMTQSPSSLSASVGDRVTITCRASQGISNYLAWYQQKPGKVPKLLIYVASTLQSGVPSRFSGSGSGTDFTLTISSLQPEDVATYYCQNYISAPLTFGGGTKVEIK

SEQ ID NO: 1330 - protein, 113 aa, Synthetic construct
DIVMTQSPDSLAVSLGERATINCKSSQSVLYSSNNKNYLAWYQQKPGQPPKLLIYWASTRESGVPDRFSGSGSGTDFTLTISSLQAEDVAVYYCQQYYSTPWTFGQGTKVEIK

SEQ ID NO: 1331 - protein, 108 aa, Synthetic construct
EIVLTQSPGTLSLSPGERATLSCRASQSVSSSYLAWYQQKPGQAPRLLIYGASSRATGIPDRFSGSGSGTDFTLTISRLEPEDFAVYYCQQYGSSPYTFGQGTKLEIK

SEQ ID NO: 1332 - protein, 107 aa, Synthetic construct
DIQMTQSPSSLSASVGDRVNITCRASQGISNYLAWYQQKPGKVPKLLIYAASTLQSGVPSRFSGSGSGTDFTLTISSLQPEDVASYFCQKYISAPLTFGGGTKVEIK

SEQ ID NO: 1333 - protein, 107 aa, Synthetic construct
DIQMTQSPSSLSASVGDRVTITCRASQGISNYLAWYQQKPGKVPKLLIYAASTLQSGVPSRFSGSGSGTDFTLTISSLQPEDVASYYCQDYTSAPLTFGGGTKVEIK

SEQ ID NO: 1334 - protein, 108 aa, Synthetic construct
EIVLTQSPGTLSLSPGERATLSCRASQSVSDSYLAWYQQEPGQAPRLLIYGASSRATGIPDRFSGSGSGTDFTLTISRLEPEDFALYYCQQYDSSPFTFGPGTKVDIK

SEQ ID NO: 1335 - protein, 113 aa, Synthetic construct; identical to SEQ ID NO: 401

SEQ ID NO: 1336 - protein, 113 aa, Synthetic construct; identical to SEQ ID NO: 402

SEQ ID NO: 1337 - protein, 113 aa, Synthetic construct; identical to SEQ ID NO: 402

SEQ ID NO: 1338 - protein, 113 aa, Synthetic construct; identical to SEQ ID NO: 402

SEQ ID NO: 1339 - protein, 113 aa, Synthetic construct; identical to SEQ ID NO: 402

SEQ ID NO: 1340 - protein, 107 aa, Synthetic construct
DIQMTQSPSSLSASVGDRVTITCRASQTIRNFLNWYQRKPGKAPKILIYAASSLQSGVPSRFSGSGSGTDFTLTISSLQPADFATYYCQQTYSIPITFGQGTRLEIK

SEQ ID NO: 1341 - protein, 107 aa, Synthetic construct
DIQMTQSPSSLSASVGDRVTITCRASQSISRYLNWYQQKPGKAPKLLLYAASSLQSGVPSKFSGSGSGTDFTLTISSLQPEDFATYYCQQSYSSPITFGQGTRLEIK

SEQ ID NO: 1342 - protein, 112 aa, Synthetic construct
DIVMTQSPLSLPVTPGEPASISCRSSQSLLHSNGYNYLDWYLQKPGQSPQLLIYLGSNRASGVPDRFSGSGSGTDFTLKISRVEAEDVGVYYCMQTLQTPPTFGQGTKVEIK

SEQ ID NO: 1343 - protein, 107 aa, Synthetic construct
DIQLTQSPSFLSASVGDRLTITCRASQGISSYLAWYQQKPGKAPKLLIYTASTLQSGVPSRFSGSGSGTEFTLTISSLQPEDFATYYCQQLNGYPPTFGQGTKVEIK

SEQ ID NO: 1344 - protein, 107 aa, Synthetic construct
DIQMTQSPSSLSASVGDRVTITCRASQSITSYLNWYQQKPGKAPKLLIFAASSLQSGVPSRFSGSGSGTDFTLTISSLQPEDFATYYCQQSYSTPLTFGGGTKVEIK

SEQ ID NO: 1345 - protein, 113 aa, Synthetic construct; identical to SEQ ID NO: 1324

SEQ ID NO: 1346 - protein, 107 aa, Synthetic construct
DIQMTQSPSSLSASVGERVTITCRASQSISSYLNWYQQKPGKAPNLLIYAASSFQSGVPSRVSGSGSGTDFTLTISSLQPEDFATYYCQQSYSNPYTFGQGTKLEIK

SEQ ID NO: 1347 - protein, 108 aa, Synthetic construct
EIVLTQSPGTLSLSPGERATLSCRASQSVSRSYLAWYQQKPGQAPRLLIYGASSRATGIPDRFSGSGSGTDFTLTISRLEPEDFAVYYCQQYGSSPWTFGQGTKVEIK

SEQ ID NO: 1348 - protein, 112 aa, Synthetic construct
DIVMTQSPLSLPVTPGEPASISCRSSQILLHTNGYNYLDWYLQKPGQSPQLLIYLGSYRASGVPDRFSGSGSGTDFTLKISRVEAGDVGLYYCMQALQTPLTFGGGTKVEIK

SEQ ID NO: 1349 - DNA, 1353 bp, Synthetic construct
  source 1..1353: mol_type = other DNA
caggtgcagctgcaggagtcgggcccaggactggtgaagccttcggggaccctgtccctcacctgcgctgtctctggtggctccatcagcattaataactggtggagttgggtccgccagcccccagggaaggggctggagtggcttggaaaaatctatcatagtgggaacaccgactacaacccgtccctcaagagtcgagtcaccatatcagtagacaagtccaagaatcagttctccctgaggctgagttctgtgaccgccgcggacacggccgtatattattgtgcgagcggaagcgattacgatttttggagtggttatttggactactggggccagggaaccctggtcaccgtctcctcagctagcactaaagggccttctgtatttcccttggccccgtccagcaaatcgacctcgggagggacagccgccctgggttgccttgtgaaagattatttccctgagccagttaccgtaagttggaacagtggggcgctgacaagtggtgtgcacacgtttcctgccgtcctgcaatcatcgggcttgtatagcctcagctctgtggtcactgtcccaagttcatcgctgggcactcagacgtatatttgcaatgtgaaccacaaaccttcaaatacaaaagtggataaacgcgtagaaccgaaatcgtgtgataaaactcacacatgcccgccatgcccggcacctgaactgcttggtggtcccagcgtgttcctgttcccgccgaagcctaaagatactctaatgatcagccgtacgccagaggtgacatgtgtcgtggttgacgtgtcccacgaagatcccgaagttaagttcaattggtatgttgatggtgtagaggtacacaatgctaagactaaacctcgcgaggagcagtacgcctcgacctatcgtgtcgtgagcgttctgaccgtccttcaccaagattggcttaacggcaaagaatataagtgcaaggtaagcaataaagcacttccggccccaatcgagaaaaccatttccaaggccaaaggtcaaccaagagaaccccaggtgtatactcttccgccttctcgtgaggaaatgactaaaaatcaagtatcccttacgtgtctggttaaaggtttttatcctagcgatattgctgttgaatgggaatcgaacggtcagccggagaataattataaaacaacgccacccgtcctggatagcgacggctcattttttctgtatagcaaactgactgtagataaatcacggtggcagcagggcaatgtattcagttgctccgttatgcatgaagcgttacataatcactacacgcagaaatctcttagtctttcacccggt

SEQ ID NO: 1350 - DNA, 1350 bp, Synthetic construct
  source 1..1350: mol_type = other DNA
gaagtgcagctggtggagtctgggggaggcttggtacagcctggcaggtccctgagactctcctgtgcagcctctggattcacctttgatgattatgccatgcactgggtccggcaagctccagggaagggcctggagtgggtctcaggtattagttggaatagtggtagcatagcctatgcggactctgtgaagggccgattcaccatctccagagacaacgccaagaactccctgtatctgcaaatgaacagtctgagagttgaggacacggcctttttttactgtgcaagagtcgcagcagcagctggtatccctttctttgactactggggccagggaaccctggtcaccgtctcctcagctagcactaaagggccttctgtatttcccttggccccgtccagcaaatcgacctcgggagggacagccgccctgggttgccttgtgaaagattatttccctgagccagttaccgtaagttggaacagtggggcgctgacaagtggtgtgcacacgtttcctgccgtcctgcaatcatcgggcttgtatagcctcagctctgtggtcactgtcccaagttcatcgctgggcactcagacgtatatttgcaatgtgaaccacaaaccttcaaatacaaaagtggataaacgcgtagaaccgaaatcgtgtgataaaactcacacatgcccgccatgcccggcacctgaactgcttggtggtcccagcgtgttcctgttcccgccgaagcctaaagatactctaatgatcagccgtacgccagaggtgacatgtgtcgtggttgacgtgtcccacgaagatcccgaagttaagttcaattggtatgttgatggtgtagaggtacacaatgctaagactaaacctcgcgaggagcagtacgcctcgacctatcgtgtcgtgagcgttctgaccgtccttcaccaagattggcttaacggcaaagaatataagtgcaaggtaagcaataaagcacttccggccccaatcgagaaaaccatttccaaggccaaaggtcaaccaagagaaccccaggtgtatactcttccgccttctcgtgaggaaatgactaaaaatcaagtatcccttacgtgtctggttaaaggtttttatcctagcgatattgctgttgaatgggaatcgaacggtcagccggagaataattataaaacaacgccacccgtcctggatagcgacggctcattttttctgtatagcaaactgactgtagataaatcacggtggcagcagggcaatgtattcagttgctccgttatgcatgaagcgttacataatcactacacgcagaaatctcttagtctttcacccggt

SEQ ID NO: 1351 - DNA, 1350 bp, Synthetic construct
  source 1..1350: mol_type = other DNA
caggtgcagctgcaggagtcgggcccaggactggtgaagccttctgggaccctgaccctcacctgcgctgtctctggtggctccatcaacagggataactggtggagttgggtccgccagcccccggggaaggggctggagtggattggacaaatctatcagagtgggagcaccaactacaacccgtccctcaagagtcgggtcaccatatcagtcgacaagtccaagaaccagttctccctgaagctgagttctgtgaccgccgcggacacggccgtatattactgtgcgagagtatatgactggaactacgggggtcactttgactactggggccagggaaccctggtcaccgtctcctcagctagcactaaagggccttctgtatttcccttggccccgtccagcaaatcgacctcgggagggacagccgccctgggttgccttgtgaaagattatttccctgagccagttaccgtaagttggaacagtggggcgctgacaagtggtgtgcacacgtttcctgccgtcctgcaatcatcgggcttgtatagcctcagctctgtggtcactgtcccaagttcatcgctgggcactcagacgtatatttgcaatgtgaaccacaaaccttcaaatacaaaagtggataaacgcgtagaaccgaaatcgtgtgataaaactcacacatgcccgccatgcccggcacctgaactgcttggtggtcccagcgtgttcctgttcccgccgaagcctaaagatactctaatgatcagccgtacgccagaggtgacatgtgtcgtggttgacgtgtcccacgaagatcccgaagttaagttcaattggtatgttgatggtgtagaggtacacaatgctaagactaaacctcgcgaggagcagtacgcctcgacctatcgtgtcgtgagcgttctgaccgtccttcaccaagattggcttaacggcaaagaatataagtgcaaggtaagcaataaagcacttccggccccaatcgagaaaaccatttccaaggccaaaggtcaaccaagagaaccccaggtgtatactcttccgccttctcgtgaggaaatgactaaaaatcaagtatcccttacgtgtctggttaaaggtttttatcctagcgatattgctgttgaatgggaatcgaacggtcagccggagaataattataaaacaacgccacccgtcctggatagcgacggctcattttttctgtatagcaaactgactgtagataaatcacggtggcagcagggcaatgtattcagttgctccgttatgcatgaagcgttacataatcactacacgcagaaatctcttagtctttcacccggt

SEQ ID NO: 1352 - DNA, 1347 bp, Synthetic construct
  source 1..1347: mol_type = other DNA
caggtgcagctgcaggagtcgggcccaggactggtgaagccttcggggaccctgtccctcacctgcgctgtctctggtgactccatcagcagtaataactggtggagttgggtccgccagcccccagggaaggggctggagtggattggacaaatctatcatagtggccacaccaactacaacccgtccctcaagagtcgagtcaccatatcggttgacatgtccaagaaccagttctccctgaagctgacctctgtgaccgccgcggacacggccgtgtattactgtgcgaggggggctacagaaattctggggtacttcgatctctggggccgtggcaccctggtcactgtctcctcagctagcactaaagggccttctgtatttcccttggccccgtccagcaaatcgacctcgggagggacagccgccctgggttgccttgtgaaagattatttccctgagccagttaccgtaagttggaacagtggggcgctgacaagtggtgtgcacacgtttcctgccgtcctgcaatcatcgggcttgtatagcctcagctctgtggtcactgtcccaagttcatcgctgggcactcagacgtatatttgcaatgtgaaccacaaaccttcaaatacaaaagtggataaacgcgtagaaccgaaatcgtgtgataaaactcacacatgcccgccatgcccggcacctgaactgcttggtggtcccagcgtgttcctgttcccgccgaagcctaaagatactctaatgatcagccgtacgccagaggtgacatgtgtcgtggttgacgtgtcccacgaagatcccgaagttaagttcaattggtatgttgatggtgtagaggtacacaatgctaagactaaacctcgcgaggagcagtacgcctcgacctatcgtgtcgtgagcgttctgaccgtccttcaccaagattggcttaacggcaaagaatataagtgcaaggtaagcaataaagcacttccggccccaatcgagaaaaccatttccaaggccaaaggtcaaccaagagaaccccaggtgtatactcttccgccttctcgtgaggaaatgactaaaaatcaagtatcccttacgtgtctggttaaaggtttttatcctagcgatattgctgttgaatgggaatcgaacggtcagccggagaataattataaaacaacgccacccgtcctggatagcgacggctcattttttctgtatagcaaactgactgtagataaatcacggtggcagcagggcaatgtattcagttgctccgttatgcatgaagcgttacataatcactacacgcagaaatctcttagtctttcacccggt

SEQ ID NO: 1353 - DNA, 1353 bp, Synthetic construct
  source 1..1353: mol_type = other DNA
caggtgcagctgcaggagtcgggcccaggactggtgaagccttcggagaccctgtccctcacctgcactgtctctggtggctccgtcagcagtggtagttactactggagctggatccggcagcccccagggaagggactggagtggattggatatatctataaaagtgggttcaccaattacaacccctccctcaagagtcgagtcaccatatcagtagacacgtccaagaaccagttctccctgaagctgagctctgtgaccgctgcggacacggccgtgtattactgtgcgatagggggacgtggatacagctatggtccttttgactactggggccagggaaccctggtcaccgtctcctcagctagcactaaagggccttctgtatttcccttggccccgtccagcaaatcgacctcgggagggacagccgccctgggttgccttgtgaaagattatttccctgagccagttaccgtaagttggaacagtggggcgctgacaagtggtgtgcacacgtttcctgccgtcctgcaatcatcgggcttgtatagcctcagctctgtggtcactgtcccaagttcatcgctgggcactcagacgtatatttgcaatgtgaaccacaaaccttcaaatacaaaagtggataaacgcgtagaaccgaaatcgtgtgataaaactcacacatgcccgccatgcccggcacctgaactgcttggtggtcccagcgtgttcctgttcccgccgaagcctaaagatactctaatgatcagccgtacgccagaggtgacatgtgtcgtggttgacgtgtcccacgaagatcccgaagttaagttcaattggtatgttgatggtgtagaggtacacaatgctaagactaaacctcgcgaggagcagtacgcctcgacctatcgtgtcgtgagcgttctgaccgtccttcaccaagattggcttaacggcaaagaatataagtgcaaggtaagcaataaagcacttccggccccaatcgagaaaaccatttccaaggccaaaggtcaaccaagagaaccccaggtgtatactcttccgccttctcgtgaggaaatgactaaaaatcaagtatcccttacgtgtctggttaaaggtttttatcctagcgatattgctgttgaatgggaatcgaacggtcagccggagaataattataaaacaacgccacccgtcctggatagcgacggctcattttttctgtatagcaaactgactgtagataaatcacggtggcagcagggcaatgtattcagttgctccgttatgcatgaagcgttacataatcactacacgcagaaatctcttagtctttcacccggt

SEQ ID NO: 1354 - DNA, 1350 bp, Synthetic construct
  source 1..1350: mol_type = other DNA
caggtgcagctggtgcagtctggggctgaggtgaagaagcctggggcctcagtgaaggtctcctgcaaggcttctggatacaccttcaccggctactatttacactgggtgcgacaggcccctggacaaggacttgagtggatgggatggatcaaccctaacagtggtgacacaaactatgtacagaactttcagggcagggtcaccatgaccagggacacgtccatcagcacagcctacatggagctgagcaggctgagatctgacgacacggccgtgtattactgtgcgagatcctacgtggataccagctcgtcggcttttgatatctggggacaagggacaatggtcaccgtctcttcagctagcactaaagggccttctgtatttcccttggccccgtccagcaaatcgacctcgggagggacagccgccctgggttgccttgtgaaagattatttccctgagccagttaccgtaagttggaacagtggggcgctgacaagtggtgtgcacacgtttcctgccgtcctgcaatcatcgggcttgtatagcctcagctctgtggtcactgtcccaagttcatcgctgggcactcagacgtatatttgcaatgtgaaccacaaaccttcaaatacaaaagtggataaacgcgtagaaccgaaatcgtgtgataaaactcacacatgcccgccatgcccggcacctgaactgcttggtggtcccagcgtgttcctgttcccgccgaagcctaaagatactctaatgatcagccgtacgccagaggtgacatgtgtcgtggttgacgtgtcccacgaagatcccgaagttaagttcaattggtatgttgatggtgtagaggtacacaatgctaagactaaacctcgcgaggagcagtacgcctcgacctatcgtgtcgtgagcgttctgaccgtccttcaccaagattggcttaacggcaaagaatataagtgcaaggtaagcaataaagcacttccggccccaatcgagaaaaccatttccaaggccaaaggtcaaccaagagaaccccaggtgtatactcttccgccttctcgtgaggaaatgactaaaaatcaagtatcccttacgtgtctggttaaaggtttttatcctagcgatattgctgttgaatgggaatcgaacggtcagccggagaataattataaaacaacgccacccgtcctggatagcgacggctcattttttctgtatagcaaactgactgtagataaatcacggtggcagcagggcaatgtattcagttgctccgttatgcatgaagcgttacataatcactacacgcagaaatctcttagtctttcacccggt

SEQ ID NO: 1355 - DNA, 1347 bp, Synthetic construct
  source 1..1347: mol_type = other DNA
caggtgcagctgcaggagtcgggcccaggactggtgaagccttcggagaccctgtccctcacctgcactgtctctggtggctccatcagtagttactactggagctggatccggcagccccccgggaagggactggagtggattgggtatgtctattacagtgggtacaccaagtacaacccctccctcaagagtcgagtcaccatatcagtagacacgcccaagacccagttctccctgaagatgagctctgtgaccgctgcggacacggccgtgtattactgtgcgagcgtcgaatcaaagtggaactacgggccttttgatatctggggacaagggacaatggtcaccgtctcttcagctagcactaaagggccttctgtatttcccttggccccgtccagcaaatcgacctcgggagggacagccgccctgggttgccttgtgaaagattatttccctgagccagttaccgtaagttggaacagtggggcgctgacaagtggtgtgcacacgtttcctgccgtcctgcaatcatcgggcttgtatagcctcagctctgtggtcactgtcccaagttcatcgctgggcactcagacgtatatttgcaatgtgaaccacaaaccttcaaatacaaaagtggataaacgcgtagaaccgaaatcgtgtgataaaactcacacatgcccgccatgcccggcacctgaactgcttggtggtcccagcgtgttcctgttcccgccgaagcctaaagatactctaatgatcagccgtacgccagaggtgacatgtgtcgtggttgacgtgtcccacgaagatcccgaagttaagttcaattggtatgttgatggtgtagaggtacacaatgctaagactaaacctcgcgaggagcagtacgcctcgacctatcgtgtcgtgagcgttctgaccgtccttcaccaagattggcttaacggcaaagaatataagtgcaaggtaagcaataaagcacttccggccccaatcgagaaaaccatttccaaggccaaaggtcaaccaagagaaccccaggtgtatactcttccgccttctcgtgaggaaatgactaaaaatcaagtatcccttacgtgtctggttaaaggtttttatcctagcgatattgctgttgaatgggaatcgaacggtcagccggagaataattataaaacaacgccacccgtcctggatagcgacggctcattttttctgtatagcaaactgactgtagataaatcacggtggcagcagggcaatgtattcagttgctccgttatgcatgaagcgttacataatcactacacgcagaaatctcttagtctttcacccggt

SEQ ID NO: 1356 - DNA, 1359 bp, Synthetic construct
  source 1..1359: mol_type = other DNA
caggtgcagctgcaggagtcgggcccaggactggtgaagccttcggagaccctgtccctcacctgcactgtctctggtgactccatcagtagttactactggagctggatccggcagcccccagggaagggactggagtggattggatatatctattacagtgggttcaccaagtacaacccctccctcaacagtcgagtcaccatatcagtagacacgtccaagagccagttctccctgaagctgacctctgtgaccgctgcggacacggccgtgtattactgtgcgatgagagagccgagaggccggtataactggaactacgggccttttgatatctggggacaagggacaatggtcaccgtctcttcagctagcactaaagggccttctgtatttcccttggccccgtccagcaaatcgacctcgggagggacagccgccctgggttgccttgtgaaagattatttccctgagccagttaccgtaagttggaacagtggggcgctgacaagtggtgtgcacacgtttcctgccgtcctgcaatcatcgggcttgtatagcctcagctctgtggtcactgtcccaagttcatcgctgggcactcagacgtatatttgcaatgtgaaccacaaaccttcaaatacaaaagtggataaacgcgtagaaccgaaatcgtgtgataaaactcacacatgcccgccatgcccggcacctgaactgcttggtggtcccagcgtgttcctgttcccgccgaagcctaaagatactctaatgatcagccgtacgccagaggtgacatgtgtcgtggttgacgtgtcccacgaagatcccgaagttaagttcaattggtatgttgatggtgtagaggtacacaatgctaagactaaacctcgcgaggagcagtacgcctcgacctatcgtgtcgtgagcgttctgaccgtccttcaccaagattggcttaacggcaaagaatataagtgcaaggtaagcaataaagcacttccggccccaatcgagaaaaccatttccaaggccaaaggtcaaccaagagaaccccaggtgtatactcttccgccttctcgtgaggaaatgactaaaaatcaagtatcccttacgtgtctggttaaaggtttttatcctagcgatattgctgttgaatgggaatcgaacggtcagccggagaataattataaaacaacgccacccgtcctggatagcgacggctcattttttctgtatagcaaactgactgtagataaatcacggtggcagcagggcaatgtattcagttgctccgttatgcatgaagcgttacataatcactacacgcagaaatctcttagtctttcacccggt

SEQ ID NO: 1357 - DNA, 1338 bp, Synthetic construct
  source 1..1338: mol_type = other DNA
caggtgcagctgcaggagtcgggcccaggactggtgaagccttcggggaccctgtccctcacctgcgctgtctctggtggctccatcagtaatgataactggtggagttgggtccgccagccccccgggaagggactggagtggattgggaaaatctatcatagtgagttcaccaactacaacccgtccctcaagagtcgagtcaccatatcagtagacaagtccaagaaccagttctccctggagctgaactctgtgaccgccgcggacacggccgtgtattactgtgcgagagagtatcataatttcatggacgtctggtgcaaagggaccacggtcaccgtctcctcagctagcactaaagggccttctgtatttcccttggccccgtccagcaaatcgacctcgggagggacagccgccctgggttgccttgtgaaagattatttccctgagccagttaccgtaagttggaacagtggggcgctgacaagtggtgtgcacacgtttcctgccgtcctgcaatcatcgggcttgtatagcctcagctctgtggtcactgtcccaagttcatcgctgggcactcagacgtatatttgcaatgtgaaccacaaaccttcaaatacaaaagtggataaacgcgtagaaccgaaatcgtgtgataaaactcacacatgcccgccatgcccggcacctgaactgcttggtggtcccagcgtgttcctgttcccgccgaagcctaaagatactctaatgatcagccgtacgccagaggtgacatgtgtcgtggttgacgtgtcccacgaagatcccgaagttaagttcaattggtatgttgatggtgtagaggtacacaatgctaagactaaacctcgcgaggagcagtacgcctcgacctatcgtgtcgtgagcgttctgaccgtccttcaccaagattggcttaacggcaaagaatataagtgcaaggtaagcaataaagcacttccggccccaatcgagaaaaccatttccaaggccaaaggtcaaccaagagaaccccaggtgtatactcttccgccttctcgtgaggaaatgactaaaaatcaagtatcccttacgtgtctggttaaaggtttttatcctagcgatattgctgttgaatgggaatcgaacggtcagccggagaataattataaaacaacgccacccgtcctggatagcgacggctcattttttctgtatagcaaactgactgtagataaatcacggtggcagcagggcaatgtattcagttgctccgttatgcatgaagcgttacataatcactacacgcagaaatctcttagtctttcacccggt

SEQ ID NO: 1358 - DNA, 1353 bp, Synthetic construct
  source 1..1353: mol_type = other DNA
caggtgcagctgcaggagtcgggcccaggactggtgaagccttcggagaccctgtccctcacctgcactgtctctggtgactccgtcagcagtggtaaatacttctggagctggatccggcagtccccagggaagggactggagtggattgggtatatctattacagtgggagcaccaactacaacccctccctcaagaatcgagtcaccatatcggtagacacgtccaagaaggagttgtctctgaagctgagttctgtgaccgctgcggacacggccgtttattactgtgcgagaggagggcataactggaactacgctgcttttgatatctggggacaagggacaatggtcaccgtctcttcagctagcactaaagggccttctgtatttcccttggccccgtccagcaaatcgacctcgggagggacagccgccctgggttgccttgtgaaagattatttccctgagccagttaccgtaagttggaacagtggggcgctgacaagtggtgtgcacacgtttcctgccgtcctgcaatcatcgggcttgtatagcctcagctctgtggtcactgtcccaagttcatcgctgggcactcagacgtatatttgcaatgtgaaccacaaaccttcaaatacaaaagtggataaacgcgtagaaccgaaatcgtgtgataaaactcacacatgcccgccatgcccggcacctgaactgcttggtggtcccagcgtgttcctgttcccgccgaagcctaaagatactctaatgatcagccgtacgccagaggtgacatgtgtcgtggttgacgtgtcccacgaagatcccgaagttaagttcaattggtatgttgatggtgtagaggtacacaatgctaagactaaacctcgcgaggagcagtacgcctcgacctatcgtgtcgtgagcgttctgaccgtccttcaccaagattggcttaacggcaaagaatataagtgcaaggtaagcaataaagcacttccggccccaatcgagaaaaccatttccaaggccaaaggtcaaccaagagaaccccaggtgtatactcttccgccttctcgtgaggaaatgactaaaaatcaagtatcccttacgtgtctggttaaaggtttttatcctagcgatattgctgttgaatgggaatcgaacggtcagccggagaataattataaaacaacgccacccgtcctggatagcgacggctcattttttctgtatagcaaactgactgtagataaatcacggtggcagcagggcaatgtattcagttgctccgttatgcatgaagcgttacataatcactacacgcagaaatctcttagtctttcacccggt

SEQ ID NO: 1359 - DNA, 1338 bp, Synthetic construct
  source 1..1338: mol_type = other DNA
caggtgcagctgcaggagtcgggcccaggactggtgaagccttcggggaccctgtccctcacctgcgctgtctctggtggctccatcagtaatgataactggtggagttgggtccgccagtcccccgggaaggggttggagtggattgggaaaatctatcatagtgagttcaccaactacaacccgtccctcaagagtcgagtcaccatatcagtagacaagtccaagaaccagttctccctggagctgagctctgtggccgccgcggacacggccgtgtattactgtgcgagagagtatgagaacttcatggacgtctggggcaaggggaccacggtcaccgtctcctcagctagcactaaagggccttctgtatttcccttggccccgtccagcaaatcgacctcgggagggacagccgccctgggttgccttgtgaaagattatttccctgagccagttaccgtaagttggaacagtggggcgctgacaagtggtgtgcacacgtttcctgccgtcctgcaatcatcgggcttgtatagcctcagctctgtggtcactgtcccaagttcatcgctgggcactcagacgtatatttgcaatgtgaaccacaaaccttcaaatacaaaagtggataaacgcgtagaaccgaaatcgtgtgataaaactcacacatgcccgccatgcccggcacctgaactgcttggtggtcccagcgtgttcctgttcccgccgaagcctaaagatactctaatgatcagccgtacgccagaggtgacatgtgtcgtggttgacgtgtcccacgaagatcccgaagttaagttcaattggtatgttgatggtgtagaggtacacaatgctaagactaaacctcgcgaggagcagtacgcctcgacctatcgtgtcgtgagcgttctgaccgtccttcaccaagattggcttaacggcaaagaatataagtgcaaggtaagcaataaagcacttccggccccaatcgagaaaaccatttccaaggccaaaggtcaaccaagagaaccccaggtgtatactcttccgccttctcgtgaggaaatgactaaaaatcaagtatcccttacgtgtctggttaaaggtttttatcctagcgatattgctgttgaatgggaatcgaacggtcagccggagaataattataaaacaacgccacccgtcctggatagcgacggctcattttttctgtatagcaaactgactgtagataaatcacggtggcagcagggcaatgtattcagttgctccgttatgcatgaagcgttacataatcactacacgcagaaatctcttagtctttcacccggt

SEQ ID NO: 1360 - DNA, 1353 bp, Synthetic construct
  source 1..1353: mol_type = other DNA
caggtgcagctgcaggagtcgggcccaggactggtgaagccttcggggaccctgtccctcacctgcgctgtctctggtgactccatcagcagtaatagctggtggaattgggtccgccagcccccagggaaggggctggagtggattgggcaaatctttcatagtggacacaccaactacaacccgtccctcaagagtcgagtcaccatgtctatagacaagtccaagaaccagttctccctgaaactgacctctgtgaccgccgcggacacggccctgtattactgtgcgagaggaggggagtatgaaaactcggcgaactggttcgacccctggggccaaggaaccctggtcaccgtctcttcagctagcactaaagggccttctgtatttcccttggccccgtccagcaaatcgacctcgggagggacagccgccctgggttgccttgtgaaagattatttccctgagccagttaccgtaagttggaacagtggggcgctgacaagtggtgtgcacacgtttcctgccgtcctgcaatcatcgggcttgtatagcctcagctctgtggtcactgtcccaagttcatcgctgggcactcagacgtatatttgcaatgtgaaccacaaaccttcaaatacaaaagtggataaacgcgtagaaccgaaatcgtgtgataaaactcacacatgcccgccatgcccggcacctgaactgcttggtggtcccagcgtgttcctgttcccgccgaagcctaaagatactctaatgatcagccgtacgccagaggtgacatgtgtcgtggttgacgtgtcccacgaagatcccgaagttaagttcaattggtatgttgatggtgtagaggtacacaatgctaagactaaacctcgcgaggagcagtacgcctcgacctatcgtgtcgtgagcgttctgaccgtccttcaccaagattggcttaacggcaaagaatataagtgcaaggtaagcaataaagcacttccggccccaatcgagaaaaccatttccaaggccaaaggtcaaccaagagaaccccaggtgtatactcttccgccttctcgtgaggaaatgactaaaaatcaagtatcccttacgtgtctggttaaaggtttttatcctagcgatattgctgttgaatgggaatcgaacggtcagccggagaataattataaaacaacgccacccgtcctggatagcgacggctcattttttctgtatagcaaactgactgtagataaatcacggtggcagcagggcaatgtattcagttgctccgttatgcatgaagcgttacataatcactacacgcagaaatctcttagtctttcacccggt

SEQ ID NO: 1361 - DNA, 1353 bp, Synthetic construct
  source 1..1353: mol_type = other DNA
caggtgcagctgcaggagtcgggcccaggactggtgaagccttcggggaccctgtccctcacctgcgctgtctctggtgtctccatcaacaaggataactggtggacttgggtccgccagcccccagggaaggggctggagtggattgggaaaatctatcatagtgggagcaccaactacaacccgtccctcaagagtcgagtcaccatatcagtagacaactccaagaaccaattctccctgaagctgaactctgtgaccgccgcggacacggccgtgtattactgtacgagagggggggatatagctatggagggggactggttcgccccctggggccagggaaccctggtcaccgtctcctcagctagcactaaagggccttctgtatttcccttggccccgtccagcaaatcgacctcgggagggacagccgccctgggttgccttgtgaaagattatttccctgagccagttaccgtaagttggaacagtggggcgctgacaagtggtgtgcacacgtttcctgccgtcctgcaatcatcgggcttgtatagcctcagctctgtggtcactgtcccaagttcatcgctgggcactcagacgtatatttgcaatgtgaaccacaaaccttcaaatacaaaagtggataaacgcgtagaaccgaaatcgtgtgataaaactcacacatgcccgccatgcccggcacctgaactgcttggtggtcccagcgtgttcctgttcccgccgaagcctaaagatactctaatgatcagccgtacgccagaggtgacatgtgtcgtggttgacgtgtcccacgaagatcccgaagttaagttcaattggtatgttgatggtgtagaggtacacaatgctaagactaaacctcgcgaggagcagtacgcctcgacctatcgtgtcgtgagcgttctgaccgtccttcaccaagattggcttaacggcaaagaatataagtgcaaggtaagcaataaagcacttccggccccaatcgagaaaaccatttccaaggccaaaggtcaaccaagagaaccccaggtgtatactcttccgccttctcgtgaggaaatgactaaaaatcaagtatcccttacgtgtctggttaaaggtttttatcctagcgatattgctgttgaatgggaatcgaacggtcagccggagaataattataaaacaacgccacccgtcctggatagcgacggctcattttttctgtatagcaaactgactgtagataaatcacggtggcagcagggcaatgtattcagttgctccgttatgcatgaagcgttacataatcactacacgcagaaatctcttagtctttcacccggt

SEQ ID NO: 1362 - DNA, 1347 bp, Synthetic construct
  source 1..1347: mol_type = other DNA
caggtgcagctgcaggagtcgggcccaggactggtgaagccttcggggaccctgtccctcacctgcgctgtctctggtggctccatcagcagtgataactggtggaattgggtccgccagcccccagggaaggggctggagtggcttggaaaaatctatcatagtgggaacaccgactacaacccgtccctcaagagtcgagtcaccatatcagtagacaagtccaagaatcagttctccctgaggctgagttctgtgaccgccgcggacacggccgtgtattactgtgcgagaggtggaactgaaactacggggtacatggacgtctggggcaaagggaccacggtcaccgtctcctcagctagcactaaagggccttctgtatttcccttggccccgtccagcaaatcgacctcgggagggacagccgccctgggttgccttgtgaaagattatttccctgagccagttaccgtaagttggaacagtggggcgctgacaagtggtgtgcacacgtttcctgccgtcctgcaatcatcgggcttgtatagcctcagctctgtggtcactgtcccaagttcatcgctgggcactcagacgtatatttgcaatgtgaaccacaaaccttcaaatacaaaagtggataaacgcgtagaaccgaaatcgtgtgataaaactcacacatgcccgccatgcccggcacctgaactgcttggtggtcccagcgtgttcctgttcccgccgaagcctaaagatactctaatgatcagccgtacgccagaggtgacatgtgtcgtggttgacgtgtcccacgaagatcccgaagttaagttcaattggtatgttgatggtgtagaggtacacaatgctaagactaaacctcgcgaggagcagtacgcctcgacctatcgtgtcgtgagcgttctgaccgtccttcaccaagattggcttaacggcaaagaatataagtgcaaggtaagcaataaagcacttccggccccaatcgagaaaaccatttccaaggccaaaggtcaaccaagagaaccccaggtgtatactcttccgccttctcgtgaggaaatgactaaaaatcaagtatcccttacgtgtctggttaaaggtttttatcctagcgatattgctgttgaatgggaatcgaacggtcagccggagaataattataaaacaacgccacccgtcctggatagcgacggctcattttttctgtatagcaaactgactgtagataaatcacggtggcagcagggcaatgtattcagttgctccgttatgcatgaagcgttacataatcactacacgcagaaatctcttagtctttcacccggt

SEQ ID NO: 1363 - DNA, 1353 bp, Synthetic construct
  source 1..1353: mol_type = other DNA
caggtgcagctgcaggagtcgggcccaggactggtgaagccttcggggaccctgtccctcacctgcgctgtctctggtggctccatcagcaatgataactggtggagttgggtccgccagcccccagggaaggggctggaatggattgggaaaatctatcatagtgggttcaccaactacaacccgtccctcaagagtcgagtcaccatatcagtagacaagtccaagaaccagttctccctgaagctgaactctgtgaccgccgcggacacggccgtgtattactgtgcgagagggggggataactttatggagggggaggggttagggacctggggcccgggaaccctggtcaccgtctcctcagctagcactaaagggccttctgtatttcccttggccccgtccagcaaatcgacctcgggagggacagccgccctgggttgccttgtgaaagattatttccctgagccagttaccgtaagttggaacagtggggcgctgacaagtggtgtgcacacgtttcctgccgtcctgcaatcatcgggcttgtatagcctcagctctgtggtcactgtcccaagttcatcgctgggcactcagacgtatatttgcaatgtgaaccacaaaccttcaaatacaaaagtggataaacgcgtagaaccgaaatcgtgtgataaaactcacacatgcccgccatgcccggcacctgaactgcttggtggtcccagcgtgttcctgttcccgccgaagcctaaagatactctaatgatcagccgtacgccagaggtgacatgtgtcgtggttgacgtgtcccacgaagatcccgaagttaagttcaattggtatgttgatggtgtagaggtacacaatgctaagactaaacctcgcgaggagcagtacgcctcgacctatcgtgtcgtgagcgttctgaccgtccttcaccaagattggcttaacggcaaagaatataagtgcaaggtaagcaataaagcacttccggccccaatcgagaaaaccatttccaaggccaaaggtcaaccaagagaaccccaggtgtatactcttccgccttctcgtgaggaaatgactaaaaatcaagtatcccttacgtgtctggttaaaggtttttatcctagcgatattgctgttgaatgggaatcgaacggtcagccggagaataattataaaacaacgccacccgtcctggatagcgacggctcattttttctgtatagcaaactgactgtagataaatcacggtggcagcagggcaatgtattcagttgctccgttatgcatgaagcgttacataatcactacacgcagaaatctcttagtctttcacccggt

SEQ ID NO: 1364 - DNA, 1353 bp, Synthetic construct
  source 1..1353: mol_type = other DNA
caggtgcagctgcaggagtcgggcccaggactggtgaagccttcggggaccctgtccctcacctgcgctgtctctggtggctccatcagcaatgataactggtggaattgggtccgccagtccccagggaaggggctggagtggattggaaaaatctatcatagtgggttcaccgactacaacccgtccctcaagagtcgagtcaccatatcagtagacaagtccaagaaccagttctccctgaagctgagctctgtgaccgccgcggacacggccgtgtattattgtgcgagaggaaaccataactatttgtggattgggtatttggggacctggggcccgggaaccctggtcaccgtctcctcagctagcactaaagggccttctgtatttcccttggccccgtccagcaaatcgacctcgggagggacagccgccctgggttgccttgtgaaagattatttccctgagccagttaccgtaagttggaacagtggggcgctgacaagtggtgtgcacacgtttcctgccgtcctgcaatcatcgggcttgtatagcctcagctctgtggtcactgtcccaagttcatcgctgggcactcagacgtatatttgcaatgtgaaccacaaaccttcaaatacaaaagtggataaacgcgtagaaccgaaatcgtgtgataaaactcacacatgcccgccatgcccggcacctgaactgcttggtggtcccagcgtgttcctgttcccgccgaagcctaaagatactctaatgatcagccgtacgccagaggtgacatgtgtcgtggttgacgtgtcccacgaagatcccgaagttaagttcaattggtatgttgatggtgtagaggtacacaatgctaagactaaacctcgcgaggagcagtacgcctcgacctatcgtgtcgtgagcgttctgaccgtccttcaccaagattggcttaacggcaaagaatataagtgcaaggtaagcaataaagcacttccggccccaatcgagaaaaccatttccaaggccaaaggtcaaccaagagaaccccaggtgtatactcttccgccttctcgtgaggaaatgactaaaaatcaagtatcccttacgtgtctggttaaaggtttttatcctagcgatattgctgttgaatgggaatcgaacggtcagccggagaataattataaaacaacgccacccgtcctggatagcgacggctcattttttctgtatagcaaactgactgtagataaatcacggtggcagcagggcaatgtattcagttgctccgttatgcatgaagcgttacataatcactacacgcagaaatctcttagtctttcacccggt

SEQ ID NO: 1365 - DNA, 1344 bp, Synthetic construct
  source 1..1344: mol_type = other DNA
caggtgcagctgcaggagtcgggcccaggactggtgaagccttcggggaccctgtccctcatctgcgctgtctctggtggctccatcagtagtagtaattggtggagttgggtccgccagcccccagggaaggggctggagtggattgggagaatctatcatagtgggcacaccaactacaacccgtccctcaagagtcgagtcaccatatcagtagacaagtccaagaaccagttctccctgaagctgacctctgtgaccgccgcggacacggccgtgtattactgtgcgagagggagggacttaactggatactttgactactggggccagggaaccctggtcaccgtctcctcagctagcactaaagggccttctgtatttcccttggccccgtccagcaaatcgacctcgggagggacagccgccctgggttgccttgtgaaagattatttccctgagccagttaccgtaagttggaacagtggggcgctgacaagtggtgtgcacacgtttcctgccgtcctgcaatcatcgggcttgtatagcctcagctctgtggtcactgtcccaagttcatcgctgggcactcagacgtatatttgcaatgtgaaccacaaaccttcaaatacaaaagtggataaacgcgtagaaccgaaatcgtgtgataaaactcacacatgcccgccatgcccggcacctgaactgcttggtggtcccagcgtgttcctgttcccgccgaagcctaaagatactctaatgatcagccgtacgccagaggtgacatgtgtcgtggttgacgtgtcccacgaagatcccgaagttaagttcaattggtatgttgatggtgtagaggtacacaatgctaagactaaacctcgcgaggagcagtacgcctcgacctatcgtgtcgtgagcgttctgaccgtccttcaccaagattggcttaacggcaaagaatataagtgcaaggtaagcaataaagcacttccggccccaatcgagaaaaccatttccaaggccaaaggtcaaccaagagaaccccaggtgtatactcttccgccttctcgtgaggaaatgactaaaaatcaagtatcccttacgtgtctggttaaaggtttttatcctagcgatattgctgttgaatgggaatcgaacggtcagccggagaataattataaaacaacgccacccgtcctggatagcgacggctcattttttctgtatagcaaactgactgtagataaatcacggtggcagcagggcaatgtattcagttgctccgttatgcatgaagcgttacataatcactacacgcagaaatctcttagtctttcacccggt

SEQ ID NO: 1366 - DNA, 1350 bp, Synthetic construct
  source 1..1350: mol_type = other DNA
caggtgcagctgcaggagtcgggcccaggactggtgaaaccttcggggaccctgtccctcacctgcgctgtctctggtggctccatcagtaatgataactggtggagttgggtccgccagtcccccgggaaggggctggagtggattgggaaaatctatcatagtgagttcaccaactacaacccgtccctcaagagtcgagtcaccatatcagtagacaagtccaagaaccagttctccctggagctgagctctgtgaccgccgcggacacggccgtatattactgtgcgagaggggtcgatttttggagtggttcccacatggacgtctggggcaaagggaccacggtcaccgtctcctcagctagcactaaagggccttctgtatttcccttggccccgtccagcaaatcgacctcgggagggacagccgccctgggttgccttgtgaaagattatttccctgagccagttaccgtaagttggaacagtggggcgctgacaagtggtgtgcacacgtttcctgccgtcctgcaatcatcgggcttgtatagcctcagctctgtggtcactgtcccaagttcatcgctgggcactcagacgtatatttgcaatgtgaaccacaaaccttcaaatacaaaagtggataaacgcgtagaaccgaaatcgtgtgataaaactcacacatgcccgccatgcccggcacctgaactgcttggtggtcccagcgtgttcctgttcccgccgaagcctaaagatactctaatgatcagccgtacgccagaggtgacatgtgtcgtggttgacgtgtcccacgaagatcccgaagttaagttcaattggtatgttgatggtgtagaggtacacaatgctaagactaaacctcgcgaggagcagtacgcctcgacctatcgtgtcgtgagcgttctgaccgtccttcaccaagattggcttaacggcaaagaatataagtgcaaggtaagcaataaagcacttccggccccaatcgagaaaaccatttccaaggccaaaggtcaaccaagagaaccccaggtgtatactcttccgccttctcgtgaggaaatgactaaaaatcaagtatcccttacgtgtctggttaaaggtttttatcctagcgatattgctgttgaatgggaatcgaacggtcagccggagaataattataaaacaacgccacccgtcctggatagcgacggctcattttttctgtatagcaaactgactgtagataaatcacggtggcagcagggcaatgtattcagttgctccgttatgcatgaagcgttacataatcactacacgcagaaatctcttagtctttcacccggt

SEQ ID NO: 1367 - DNA, 1344 bp, Synthetic construct
  source 1..1344: mol_type = other DNA
caggtgcagctgcaggagtcgggcccaggactggtgaagccttcggggaccctgtccctcacctgcgctgtctctggtggctccatcagtaatgataactggtggagttgggtccgccagtcccccgggaaggggctggagtggattgggaaaatctatcatagtgagttcaccaactacaacccgtccctcaagagtcgagtcaccatatcagtagacaagtctaagaaccagttttccctggaactgagctctgtgaccgccgcggacacggccgtgtatttctgtgcgcgagaaggactggaactaccccacatggacgtctggggcaaagggaccacggtcaccgtctcctcagctagcactaaagggccttctgtatttcccttggccccgtccagcaaatcgacctcgggagggacagccgccctgggttgccttgtgaaagattatttccctgagccagttaccgtaagttggaacagtggggcgctgacaagtggtgtgcacacgtttcctgccgtcctgcaatcatcgggcttgtatagcctcagctctgtggtcactgtcccaagttcatcgctgggcactcagacgtatatttgcaatgtgaaccacaaaccttcaaatacaaaagtggataaacgcgtagaaccgaaatcgtgtgataaaactcacacatgcccgccatgcccggcacctgaactgcttggtggtcccagcgtgttcctgttcccgccgaagcctaaagatactctaatgatcagccgtacgccagaggtgacatgtgtcgtggttgacgtgtcccacgaagatcccgaagttaagttcaattggtatgttgatggtgtagaggtacacaatgctaagactaaacctcgcgaggagcagtacgcctcgacctatcgtgtcgtgagcgttctgaccgtccttcaccaagattggcttaacggcaaagaatataagtgcaaggtaagcaataaagcacttccggccccaatcgagaaaaccatttccaaggccaaaggtcaaccaagagaaccccaggtgtatactcttccgccttctcgtgaggaaatgactaaaaatcaagtatcccttacgtgtctggttaaaggtttttatcctagcgatattgctgttgaatgggaatcgaacggtcagccggagaataattataaaacaacgccacccgtcctggatagcgacggctcattttttctgtatagcaaactgactgtagataaatcacggtggcagcagggcaatgtattcagttgctccgttatgcatgaagcgttacataatcactacacgcagaaatctcttagtctttcacccggt

SEQ ID NO: 1368 - DNA, 1338 bp, Synthetic construct
  source 1..1338: mol_type = other DNA
gaggtgcagctggtggagtccgggggaggcgtggtcaagcctggggggtccctgagactctcctgtgcagcctctggattcaccttcagtagctactggatgcactgggtccgccaagctccagggaaggggctggtgtgggtctcacgtattaatagtgatggaagtagcacaagctacgcggactccgtgcagggccgattcaccatctccagagacatcgccaagaacacgctgtatctgcaaatgaacagtctgagagccgaggacacggctgtgtattactgtgcaagagggcagcacctggttcaggactattggggccagggaaccctggtcaccgtctcttcagctagcactaaagggccttctgtatttcccttggccccgtccagcaaatcgacctcgggagggacagccgccctgggttgccttgtgaaagattatttccctgagccagttaccgtaagttggaacagtggggcgctgacaagtggtgtgcacacgtttcctgccgtcctgcaatcatcgggcttgtatagcctcagctctgtggtcactgtcccaagttcatcgctgggcactcagacgtatatttgcaatgtgaaccacaaaccttcaaatacaaaagtggataaacgcgtagaaccgaaatcgtgtgataaaactcacacatgcccgccatgcccggcacctgaactgcttggtggtcccagcgtgttcctgttcccgccgaagcctaaagatactctaatgatcagccgtacgccagaggtgacatgtgtcgtggttgacgtgtcccacgaagatcccgaagttaagttcaattggtatgttgatggtgtagaggtacacaatgctaagactaaacctcgcgaggagcagtacgcctcgacctatcgtgtcgtgagcgttctgaccgtccttcaccaagattggcttaacggcaaagaatataagtgcaaggtaagcaataaagcacttccggccccaatcgagaaaaccatttccaaggccaaaggtcaaccaagagaaccccaggtgtatactcttccgccttctcgtgaggaaatgactaaaaatcaagtatcccttacgtgtctggttaaaggtttttatcctagcgatattgctgttgaatgggaatcgaacggtcagccggagaataattataaaacaacgccacccgtcctggatagcgacggctcattttttctgtatagcaaactgactgtagataaatcacggtggcagcagggcaatgtattcagttgctccgttatgcatgaagcgttacataatcactacacgcagaaatctcttagtctttcacccggt

SEQ ID NO: 1369 - DNA, 1350 bp, Synthetic construct
  source 1..1350: mol_type = other DNA
caggtgcagctggtgcagtctggggctgaggtgaagaaccctggggcctcagtgaaggtctcctgcaaggcttctggatacaccttcaccggctactatatgcactgggtgcgacaggcccctggacaagggcttgagtggatgggatggatcaaccctaacagtggtggcacaaactatgcacagaagtttcagggcagggtcaccatgaccagggacacgtccatcagcacagcctacatggagctgagcaggctgagatctgacgacacggccgtgtattactgtgcgagagaacggggcgactatgatggcgatgcttttgatatctggggacaagggacaatggtcaccgtctcttcagctagcactaaagggccttctgtatttcccttggccccgtccagcaaatcgacctcgggagggacagccgccctgggttgccttgtgaaagattatttccctgagccagttaccgtaagttggaacagtggggcgctgacaagtggtgtgcacacgtttcctgccgtcctgcaatcatcgggcttgtatagcctcagctctgtggtcactgtcccaagttcatcgctgggcactcagacgtatatttgcaatgtgaaccacaaaccttcaaatacaaaagtggataaacgcgtagaaccgaaatcgtgtgataaaactcacacatgcccgccatgcccggcacctgaactgcttggtggtcccagcgtgttcctgttcccgccgaagcctaaagatactctaatgatcagccgtacgccagaggtgacatgtgtcgtggttgacgtgtcccacgaagatcccgaagttaagttcaattggtatgttgatggtgtagaggtacacaatgctaagactaaacctcgcgaggagcagtacgcctcgacctatcgtgtcgtgagcgttctgaccgtccttcaccaagattggcttaacggcaaagaatataagtgcaaggtaagcaataaagcacttccggccccaatcgagaaaaccatttccaaggccaaaggtcaaccaagagaaccccaggtgtatactcttccgccttctcgtgaggaaatgactaaaaatcaagtatcccttacgtgtctggttaaaggtttttatcctagcgatattgctgttgaatgggaatcgaacggtcagccggagaataattataaaacaacgccacccgtcctggatagcgacggctcattttttctgtatagcaaactgactgtagataaatcacggtggcagcagggcaatgtattcagttgctccgttatgcatgaagcgttacataatcactacacgcagaaatctcttagtctttcacccggt

SEQ ID NO: 1370 - DNA, 1347 bp, Synthetic construct
  source 1..1347: mol_type = other DNA
gaggtgcagctggtggagtctgggggaggcttggtccagcctggggggtccctgagactctcctgtgcagcctctggattcacctttagtaactattacatgaactgggtccgccaggctccagggaaggggctggagtgggtggccaacataaagcaagatggaagtgagaaatactatgtggactctgtgaagggccgcttcaccatctccagagacaacgccaagaactcactgtatctccaaatgaacagcctgagagccgaggacacggctgtgtattactgtgcgagagatgggtactacaacttcgatgcttttgatatctggggacaagggacaatggtcaccgtctcttcagctagcactaaagggccttctgtatttcccttggccccgtccagcaaatcgacctcgggagggacagccgccctgggttgccttgtgaaagattatttccctgagccagttaccgtaagttggaacagtggggcgctgacaagtggtgtgcacacgtttcctgccgtcctgcaatcatcgggcttgtatagcctcagctctgtggtcactgtcccaagttcatcgctgggcactcagacgtatatttgcaatgtgaaccacaaaccttcaaatacaaaagtggataaacgcgtagaaccgaaatcgtgtgataaaactcacacatgcccgccatgcccggcacctgaactgcttggtggtcccagcgtgttcctgttcccgccgaagcctaaagatactctaatgatcagccgtacgccagaggtgacatgtgtcgtggttgacgtgtcccacgaagatcccgaagttaagttcaattggtatgttgatggtgtagaggtacacaatgctaagactaaacctcgcgaggagcagtacgcctcgacctatcgtgtcgtgagcgttctgaccgtccttcaccaagattggcttaacggcaaagaatataagtgcaaggtaagcaataaagcacttccggccccaatcgagaaaaccatttccaaggccaaaggtcaaccaagagaaccccaggtgtatactcttccgccttctcgtgaggaaatgactaaaaatcaagtatcccttacgtgtctggttaaaggtttttatcctagcgatattgctgttgaatgggaatcgaacggtcagccggagaataattataaaacaacgccacccgtcctggatagcgacggctcattttttctgtatagcaaactgactgtagataaatcacggtggcagcagggcaatgtattcagttgctccgttatgcatgaagcgttacataatcactacacgcagaaatctcttagtctttcacccggt

SEQ ID NO: 1371 - DNA, 1350 bp, Synthetic construct
  source 1..1350: mol_type = other DNA
gaggtgcagctggtggagtctgggggaggcttggtacagcctggggggtccctgagactctcctgtgcagcctctggattcaccttcagtagctatagcatgaactgggtccgccaggctccagggaaggggctggagtgggtctcatccattagtagtagtagtagttacatatactacgcagactcagtgaagggccgattcaccatctccagagacaacgccaagaactcactgtatctgcaaatgaacagcctgagagccgaggacacggccgtgtattactgtgcgagagaagggtatgataactggaactctgcttgtgatatctggggacaagggacaatggtcaccgtctcttcagctagcactaaagggccttctgtatttcccttggccccgtccagcaaatcgacctcgggagggacagccgccctgggttgccttgtgaaagattatttccctgagccagttaccgtaagttggaacagtggggcgctgacaagtggtgtgcacacgtttcctgccgtcctgcaatcatcgggcttgtatagcctcagctctgtggtcactgtcccaagttcatcgctgggcactcagacgtatatttgcaatgtgaaccacaaaccttcaaatacaaaagtggataaacgcgtagaaccgaaatcgtgtgataaaactcacacatgcccgccatgcccggcacctgaactgcttggtggtcccagcgtgttcctgttcccgccgaagcctaaagatactctaatgatcagccgtacgccagaggtgacatgtgtcgtggttgacgtgtcccacgaagatcccgaagttaagttcaattggtatgttgatggtgtagaggtacacaatgctaagactaaacctcgcgaggagcagtacgcctcgacctatcgtgtcgtgagcgttctgaccgtccttcaccaagattggcttaacggcaaagaatataagtgcaaggtaagcaataaagcacttccggccccaatcgagaaaaccatttccaaggccaaaggtcaaccaagagaaccccaggtgtatactcttccgccttctcgtgaggaaatgactaaaaatcaagtatcccttacgtgtctggttaaaggtttttatcctagcgatattgctgttgaatgggaatcgaacggtcagccggagaataattataaaacaacgccacccgtcctggatagcgacggctcattttttctgtatagcaaactgactgtagataaatcacggtggcagcagggcaatgtattcagttgctccgttatgcatgaagcgttacataatcactacacgcagaaatctcttagtctttcacccggt

SEQ ID NO: 1372 - DNA, 1350 bp, Synthetic construct
  source 1..1350: mol_type = other DNA
cagatcaccttgaaggagtctggtcctacgctggtgaaacccacacagaccctcacgctgacctgcaccttctctgggttttcactcagcactagtggagtgggtgtgggctggatccgtcagcccccaggaaaggccctggagtggcttgcactcatttattggaatggtgatgagcgctacagcccatctctgaagagcaggctcaccatcaccaaggacacctccaaaaaccaagtggtccttacaatgaccaacatggaccctgtggacacagccacatattactgtgcacacagtccgaactggggatatgaagcttttgatatctggggacaagggacaatggtcaccgtctcttcagctagcactaaagggccttctgtatttcccttggccccgtccagcaaatcgacctcgggagggacagccgccctgggttgccttgtgaaagattatttccctgagccagttaccgtaagttggaacagtggggcgctgacaagtggtgtgcacacgtttcctgccgtcctgcaatcatcgggcttgtatagcctcagctctgtggtcactgtcccaagttcatcgctgggcactcagacgtatatttgcaatgtgaaccacaaaccttcaaatacaaaagtggataaacgcgtagaaccgaaatcgtgtgataaaactcacacatgcccgccatgcccggcacctgaactgcttggtggtcccagcgtgttcctgttcccgccgaagcctaaagatactctaatgatcagccgtacgccagaggtgacatgtgtcgtggttgacgtgtcccacgaagatcccgaagttaagttcaattggtatgttgatggtgtagaggtacacaatgctaagactaaacctcgcgaggagcagtacgcctcgacctatcgtgtcgtgagcgttctgaccgtccttcaccaagattggcttaacggcaaagaatataagtgcaaggtaagcaataaagcacttccggccccaatcgagaaaaccatttccaaggccaaaggtcaaccaagagaaccccaggtgtatactcttccgccttctcgtgaggaaatgactaaaaatcaagtatcccttacgtgtctggttaaaggtttttatcctagcgatattgctgttgaatgggaatcgaacggtcagccggagaataattataaaacaacgccacccgtcctggatagcgacggctcattttttctgtatagcaaactgactgtagataaatcacggtggcagcagggcaatgtattcagttgctccgttatgcatgaagcgttacataatcactacacgcagaaatctcttagtctttcacccggt

SEQ ID NO: 1373 - DNA, 1350 bp, Synthetic construct
  source 1..1350: mol_type = other DNA
gaggtgcagctggtggagtctgggggaggcctggtcccgcctggggggtccctgagactctcctgtgcagcctctggattcaccttcagtagctattgcatgaactgggtccgccaggctccagggaaggggctggagtgggtctcatccattaatagtgatagtagttacatatactacgcggactcagtgaagggccgattcaccatctccagagacaacgccaagaactcactgtatctgcaaatgaacagcctgagagccgaggacacggctgtgtattactgtgcgagagagggatactacaactggaacggagggaatgactactggggccagggaaccctggtcaccgtctcctcagctagcactaaagggccttctgtatttcccttggccccgtccagcaaatcgacctcgggagggacagccgccctgggttgccttgtgaaagattatttccctgagccagttaccgtaagttggaacagtggggcgctgacaagtggtgtgcacacgtttcctgccgtcctgcaatcatcgggcttgtatagcctcagctctgtggtcactgtcccaagttcatcgctgggcactcagacgtatatttgcaatgtgaaccacaaaccttcaaatacaaaagtggataaacgcgtagaaccgaaatcgtgtgataaaactcacacatgcccgccatgcccggcacctgaactgcttggtggtcccagcgtgttcctgttcccgccgaagcctaaagatactctaatgatcagccgtacgccagaggtgacatgtgtcgtggttgacgtgtcccacgaagatcccgaagttaagttcaattggtatgttgatggtgtagaggtacacaatgctaagactaaacctcgcgaggagcagtacgcctcgacctatcgtgtcgtgagcgttctgaccgtccttcaccaagattggcttaacggcaaagaatataagtgcaaggtaagcaataaagcacttccggccccaatcgagaaaaccatttccaaggccaaaggtcaaccaagagaaccccaggtgtatactcttccgccttctcgtgaggaaatgactaaaaatcaagtatcccttacgtgtctggttaaaggtttttatcctagcgatattgctgttgaatgggaatcgaacggtcagccggagaataattataaaacaacgccacccgtcctggatagcgacggctcattttttctgtatagcaaactgactgtagataaatcacggtggcagcagggcaatgtattcagttgctccgttatgcatgaagcgttacataatcactacacgcagaaatctcttagtctttcacccggt

SEQ ID NO: 1374 - DNA, 1347 bp, Synthetic construct
  source 1..1347: mol_type = other DNA
gaggtgcagctggtggagtccgggggaggcttagttcagcctggggggtccctgagactctcctgtgcagcctctggattcaccttcagtagctattggatgcactgggtccgccaagctccagggaaggggctggtgtgggtctcacatattaatagtgatgggagtagcacaaactacgcggactccgtgaagggccgattcaccatctccagagacaacgccaagaacacgctgtatctgcagatgaacagtctgagatccgaggacacggctgtatattactgtgcaagagagggttactggaacggtgatacttttgatatctggggacaagggacaatggtcaccgtctcttcagctagcactaaagggccttctgtatttcccttggccccgtccagcaaatcgacctcgggagggacagccgccctgggttgccttgtgaaagattatttccctgagccagttaccgtaagttggaacagtggggcgctgacaagtggtgtgcacacgtttcctgccgtcctgcaatcatcgggcttgtatagcctcagctctgtggtcactgtcccaagttcatcgctgggcactcagacgtatatttgcaatgtgaaccacaaaccttcaaatacaaaagtggataaacgcgtagaaccgaaatcgtgtgataaaactcacacatgcccgccatgcccggcacctgaactgcttggtggtcccagcgtgttcctgttcccgccgaagcctaaagatactctaatgatcagccgtacgccagaggtgacatgtgtcgtggttgacgtgtcccacgaagatcccgaagttaagttcaattggtatgttgatggtgtagaggtacacaatgctaagactaaacctcgcgaggagcagtacgcctcgacctatcgtgtcgtgagcgttctgaccgtccttcaccaagattggcttaacggcaaagaatataagtgcaaggtaagcaataaagcacttccggccccaatcgagaaaaccatttccaaggccaaaggtcaaccaagagaaccccaggtgtatactcttccgccttctcgtgaggaaatgactaaaaatcaagtatcccttacgtgtctggttaaaggtttttatcctagcgatattgctgttgaatgggaatcgaacggtcagccggagaataattataaaacaacgccacccgtcctggatagcgacggctcattttttctgtatagcaaactgactgtagataaatcacggtggcagcagggcaatgtattcagttgctccgttatgcatgaagcgttacataatcactacacgcagaaatctcttagtctttcacccggt

SEQ ID NO: 1375 - DNA, 1350 bp, Synthetic construct
  source 1..1350: mol_type = other DNA
gaggtgcagctggtggagtctgggggaggcttggtacagcctggggggtccctgagactctcctgtgcagcctctggattcaccttcagtgcctacgacatgcactgggtccgccaaactccaggaaaaggtctggagtgggtctcaactattggtactgctggtgacacatactatccagactccgtgaagggccgattcaccatctccagagattttgccaggaggtccttgtatcttcacatgaacaatctgagagccggggacacggctgtatattactgtgcaagagggggcagcagcagctggtacgactggtacttcgatctctggggccgtggcaccctggtcactgtctcctcagctagcactaaagggccttctgtatttcccttggccccgtccagcaaatcgacctcgggagggacagccgccctgggttgccttgtgaaagattatttccctgagccagttaccgtaagttggaacagtggggcgctgacaagtggtgtgcacacgtttcctgccgtcctgcaatcatcgggcttgtatagcctcagctctgtggtcactgtcccaagttcatcgctgggcactcagacgtatatttgcaatgtgaaccacaaaccttcaaatacaaaagtggataaacgcgtagaaccgaaatcgtgtgataaaactcacacatgcccgccatgcccggcacctgaactgcttggtggtcccagcgtgttcctgttcccgccgaagcctaaagatactctaatgatcagccgtacgccagaggtgacatgtgtcgtggttgacgtgtcccacgaagatcccgaagttaagttcaattggtatgttgatggtgtagaggtacacaatgctaagactaaacctcgcgaggagcagtacgcctcgacctatcgtgtcgtgagcgttctgaccgtccttcaccaagattggcttaacggcaaagaatataagtgcaaggtaagcaataaagcacttccggccccaatcgagaaaaccatttccaaggccaaaggtcaaccaagagaaccccaggtgtatactcttccgccttctcgtgaggaaatgactaaaaatcaagtatcccttacgtgtctggttaaaggtttttatcctagcgatattgctgttgaatgggaatcgaacggtcagccggagaataattataaaacaacgccacccgtcctggatagcgacggctcattttttctgtatagcaaactgactgtagataaatcacggtggcagcagggcaatgtattcagttgctccgttatgcatgaagcgttacataatcactacacgcagaaatctcttagtctttcacccggt

SEQ ID NO: 1376 - DNA, 1350 bp, Synthetic construct
  source 1..1350: mol_type = other DNA
caggtgcagctgcaggagtcgggcccaggactggtgaagccttcggggaccctgtccctcacctgcgctgtctctggtggctccatcagcagtagtacctggtggagttgggtccgccagcccccagggaaggggctggagtggattggggaaatctatcatagtgggagcaccaactataacccgtccctcaagagtcgagtcaccatatcactagacaagtccaagaaccagttttccctgaagctgagctctgtgaccgccgcggacacggccgtgtattactgtgcgattagtttatacaactggaacgatgctgcttttgatatctggggacaagggacaatggtcaccgtctcttcagctagcactaaagggccttctgtatttcccttggccccgtccagcaaatcgacctcgggagggacagccgccctgggttgccttgtgaaagattatttccctgagccagttaccgtaagttggaacagtggggcgctgacaagtggtgtgcacacgtttcctgccgtcctgcaatcatcgggcttgtatagcctcagctctgtggtcactgtcccaagttcatcgctgggcactcagacgtatatttgcaatgtgaaccacaaaccttcaaatacaaaagtggataaacgcgtagaaccgaaatcgtgtgataaaactcacacatgcccgccatgcccggcacctgaactgcttggtggtcccagcgtgttcctgttcccgccgaagcctaaagatactctaatgatcagccgtacgccagaggtgacatgtgtcgtggttgacgtgtcccacgaagatcccgaagttaagttcaattggtatgttgatggtgtagaggtacacaatgctaagactaaacctcgcgaggagcagtacgcctcgacctatcgtgtcgtgagcgttctgaccgtccttcaccaagattggcttaacggcaaagaatataagtgcaaggtaagcaataaagcacttccggccccaatcgagaaaaccatttccaaggccaaaggtcaaccaagagaaccccaggtgtatactcttccgccttctcgtgaggaaatgactaaaaatcaagtatcccttacgtgtctggttaaaggtttttatcctagcgatattgctgttgaatgggaatcgaacggtcagccggagaataattataaaacaacgccacccgtcctggatagcgacggctcattttttctgtatagcaaactgactgtagataaatcacggtggcagcagggcaatgtattcagttgctccgttatgcatgaagcgttacataatcactacacgcagaaatctcttagtctttcacccggt

SEQ ID NO: 1377 - DNA, 1347 bp, Synthetic construct
  source 1..1347: mol_type = other DNA
caggtgcagctggtgcagtctgggtctgaggtgaagaagcctggggcctcagtgaaggtctcctgcaagacttctggatacacgttcaccggctactatatgcactgggtgcgacaggcccctggacaagggcttgagtggatgggatggatcaaccctaacagtggtggcacaacctatgcacagaagtttcagggcagggtcaccatgaccagggacacgtccatcagcacagcctacatggagctgaacaggctgagatctgacgacacggccgtgtattactgtgcgagagaggcaggtggttcaggtgaatacttccagcactggggccagggcaccccggtcaccgtctcttcagctagcactaaagggccttctgtatttcccttggccccgtccagcaaatcgacctcgggagggacagccgccctgggttgccttgtgaaagattatttccctgagccagttaccgtaagttggaacagtggggcgctgacaagtggtgtgcacacgtttcctgccgtcctgcaatcatcgggcttgtatagcctcagctctgtggtcactgtcccaagttcatcgctgggcactcagacgtatatttgcaatgtgaaccacaaaccttcaaatacaaaagtggataaacgcgtagaaccgaaatcgtgtgataaaactcacacatgcccgccatgcccggcacctgaactgcttggtggtcccagcgtgttcctgttcccgccgaagcctaaagatactctaatgatcagccgtacgccagaggtgacatgtgtcgtggttgacgtgtcccacgaagatcccgaagttaagttcaattggtatgttgatggtgtagaggtacacaatgctaagactaaacctcgcgaggagcagtacgcctcgacctatcgtgtcgtgagcgttctgaccgtccttcaccaagattggcttaacggcaaagaatataagtgcaaggtaagcaataaagcacttccggccccaatcgagaaaaccatttccaaggccaaaggtcaaccaagagaaccccaggtgtatactcttccgccttctcgtgaggaaatgactaaaaatcaagtatcccttacgtgtctggttaaaggtttttatcctagcgatattgctgttgaatgggaatcgaacggtcagccggagaataattataaaacaacgccacccgtcctggatagcgacggctcattttttctgtatagcaaactgactgtagataaatcacggtggcagcagggcaatgtattcagttgctccgttatgcatgaagcgttacataatcactacacgcagaaatctcttagtctttcacccggt

SEQ ID NO: 1378 - DNA, 1350 bp, Synthetic construct
  source 1..1350: mol_type = other DNA
cagatcaccttgaaggagtctggtcctacgctggtgaaacccacacagaccctcacgctgacctgcaccttctctgggttctcactcagcactagtggagtgggtgtgggctggatccgtcagcccccaggaaaggccctggagtggcttgcactcatttattggaatgatgttaagttctacagtccatctctgcagagcaggctcaccatcaccaaggacacctccaaaaaccaggtggtccttacactgaccaacatggaccctgtggacacagccacatattactgtgcacacggggataactggaactaccgtgcttttgatatctggggacaagggacaatggtcaccgtctcttcagctagcactaaagggccttctgtatttcccttggccccgtccagcaaatcgacctcgggagggacagccgccctgggttgccttgtgaaagattatttccctgagccagttaccgtaagttggaacagtggggcgctgacaagtggtgtgcacacgtttcctgccgtcctgcaatcatcgggcttgtatagcctcagctctgtggtcactgtcccaagttcatcgctgggcactcagacgtatatttgcaatgtgaaccacaaaccttcaaatacaaaagtggataaacgcgtagaaccgaaatcgtgtgataaaactcacacatgcccgccatgcccggcacctgaactgcttggtggtcccagcgtgttcctgttcccgccgaagcctaaagatactctaatgatcagccgtacgccagaggtgacatgtgtcgtggttgacgtgtcccacgaagatcccgaagttaagttcaattggtatgttgatggtgtagaggtacacaatgctaagactaaacctcgcgaggagcagtacgcctcgacctatcgtgtcgtgagcgttctgaccgtccttcaccaagattggcttaacggcaaagaatataagtgcaaggtaagcaataaagcacttccggccccaatcgagaaaaccatttccaaggccaaaggtcaaccaagagaaccccaggtgtatactcttccgccttctcgtgaggaaatgactaaaaatcaagtatcccttacgtgtctggttaaaggtttttatcctagcgatattgctgttgaatgggaatcgaacggtcagccggagaataattataaaacaacgccacccgtcctggatagcgacggctcattttttctgtatagcaaactgactgtagataaatcacggtggcagcagggcaatgtattcagttgctccgttatgcatgaagcgttacataatcactacacgcagaaatctcttagtctttcacccggt

SEQ ID NO: 1379 - DNA, 1335 bp, Synthetic construct
  source 1..1335: mol_type = other DNA
caggttcagctggtgcagtctggagctgaggtgaagaagcctggggcctcagtgaaggtctcctgcaaggcttctggttacacctttaccagctatggtatcagctgggtgcgacaggcccctggacaagggcttgagtggatgggatggatcagcgcttataatggtaacacacactatgcacagaacctccagggcagagtcaccatgaccacagacacatccacgagcacagcctacatggagctgaggagcctgagatctgacgacacggccgtgtattactgtgcgaggagtatagcagcccttgacttctggggccagggaaccccggtcaccgtctcctcagctagcactaaagggccttctgtatttcccttggccccgtccagcaaatcgacctcgggagggacagccgccctgggttgccttgtgaaagattatttccctgagccagttaccgtaagttggaacagtggggcgctgacaagtggtgtgcacacgtttcctgccgtcctgcaatcatcgggcttgtatagcctcagctctgtggtcactgtcccaagttcatcgctgggcactcagacgtatatttgcaatgtgaaccacaaaccttcaaatacaaaagtggataaacgcgtagaaccgaaatcgtgtgataaaactcacacatgcccgccatgcccggcacctgaactgcttggtggtcccagcgtgttcctgttcccgccgaagcctaaagatactctaatgatcagccgtacgccagaggtgacatgtgtcgtggttgacgtgtcccacgaagatcccgaagttaagttcaattggtatgttgatggtgtagaggtacacaatgctaagactaaacctcgcgaggagcagtacgcctcgacctatcgtgtcgtgagcgttctgaccgtccttcaccaagattggcttaacggcaaagaatataagtgcaaggtaagcaataaagcacttccggccccaatcgagaaaaccatttccaaggccaaaggtcaaccaagagaaccccaggtgtatactcttccgccttctcgtgaggaaatgactaaaaatcaagtatcccttacgtgtctggttaaaggtttttatcctagcgatattgctgttgaatgggaatcgaacggtcagccggagaataattataaaacaacgccacccgtcctggatagcgacggctcattttttctgtatagcaaactgactgtagataaatcacggtggcagcagggcaatgtattcagttgctccgttatgcatgaagcgttacataatcactacacgcagaaatctcttagtctttcacccggt

SEQ ID NO: 1380 - DNA, 1350 bp, Synthetic construct
  source 1..1350: mol_type = other DNA
caggtgcagctgcaggagtcgggcccaggactggtgaagccttcggggaccctgtccctcacctgcgctgtctctggtggctccatcagcagtaataactggtggagttgggtccgccagcccccagggaagggactggagtggattggacaaatctatcatagtgaaaacaccaactacaacccgtccctcaagagtcgagtcaccatatcagtagacaagtccaagaaccagttctccctgaagctgagctctgtgaccgccgcggacacggccatctattactgtgcgagagtggatgactggaactacgggggtcactttgactactggggccagggaaccctggtcaccgtctcctcagctagcactaaagggccttctgtatttcccttggccccgtccagcaaatcgacctcgggagggacagccgccctgggttgccttgtgaaagattatttccctgagccagttaccgtaagttggaacagtggggcgctgacaagtggtgtgcacacgtttcctgccgtcctgcaatcatcgggcttgtatagcctcagctctgtggtcactgtcccaagttcatcgctgggcactcagacgtatatttgcaatgtgaaccacaaaccttcaaatacaaaagtggataaacgcgtagaaccgaaatcgtgtgataaaactcacacatgcccgccatgcccggcacctgaactgcttggtggtcccagcgtgttcctgttcccgccgaagcctaaagatactctaatgatcagccgtacgccagaggtgacatgtgtcgtggttgacgtgtcccacgaagatcccgaagttaagttcaattggtatgttgatggtgtagaggtacacaatgctaagactaaacctcgcgaggagcagtacgcctcgacctatcgtgtcgtgagcgttctgaccgtccttcaccaagattggcttaacggcaaagaatataagtgcaaggtaagcaataaagcacttccggccccaatcgagaaaaccatttccaaggccaaaggtcaaccaagagaaccccaggtgtatactcttccgccttctcgtgaggaaatgactaaaaatcaagtatcccttacgtgtctggttaaaggtttttatcctagcgatattgctgttgaatgggaatcgaacggtcagccggagaataattataaaacaacgccacccgtcctggatagcgacggctcattttttctgtatagcaaactgactgtagataaatcacggtggcagcagggcaatgtattcagttgctccgttatgcatgaagcgttacataatcactacacgcagaaatctcttagtctttcacccggt

SEQ ID NO: 1381 - DNA, 1335 bp, Synthetic construct
  source 1..1335: mol_type = other DNA
caggttcagctggtgcagtctggagctgaggtgaagaagcctggggcctcagttaaggtctcctgcaaggcttctggttacacctttaccggctatggtatcagctgggtgcgacaggcccctggacaagggcttgagtggatgggatggatcagcgcttacaatggtaacacacactatgcacagaacctccagggcagagtcaccatgaccaccgacacatccacgaacacagcctacatggagctgaggagccttatatctgacgacacggccttttattattgtgcgagagcgggactggggatcgactactggggccagggaaccctggtcactgtctcctcagctagcactaaagggccttctgtatttcccttggccccgtccagcaaatcgacctcgggagggacagccgccctgggttgccttgtgaaagattatttccctgagccagttaccgtaagttggaacagtggggcgctgacaagtggtgtgcacacgtttcctgccgtcctgcaatcatcgggcttgtatagcctcagctctgtggtcactgtcccaagttcatcgctgggcactcagacgtatatttgcaatgtgaaccacaaaccttcaaatacaaaagtggataaacgcgtagaaccgaaatcgtgtgataaaactcacacatgcccgccatgcccggcacctgaactgcttggtggtcccagcgtgttcctgttcccgccgaagcctaaagatactctaatgatcagccgtacgccagaggtgacatgtgtcgtggttgacgtgtcccacgaagatcccgaagttaagttcaattggtatgttgatggtgtagaggtacacaatgctaagactaaacctcgcgaggagcagtacgcctcgacctatcgtgtcgtgagcgttctgaccgtccttcaccaagattggcttaacggcaaagaatataagtgcaaggtaagcaataaagcacttccggccccaatcgagaaaaccatttccaaggccaaaggtcaaccaagagaaccccaggtgtatactcttccgccttctcgtgaggaaatgactaaaaatcaagtatcccttacgtgtctggttaaaggtttttatcctagcgatattgctgttgaatgggaatcgaacggtcagccggagaataattataaaacaacgccacccgtcctggatagcgacggctcattttttctgtatagcaaactgactgtagataaatcacggtggcagcagggcaatgtattcagttgctccgttatgcatgaagcgttacataatcactacacgcagaaatctcttagtctttcacccggt

SEQ ID NO: 1382 - DNA, 1347 bp, Synthetic construct
  source 1..1347: mol_type = other DNA
caggtgcagctgcaggagtcgggcccaggactggtgaagccttcggggaccctgtccctcacctgcgctgtctctggtggctccatcagcagtagtgactggtggagttgggtccgccagtccccagggaaggggctggagtggattggggaaatctatcatagtgggagcaccaactacaacccgtccctcaagagtcgagtctccatatcagtagacaagtccaagaaccagttctccctgaagctgagctctgtgaccgccgcggacacggccgtgtattactgtgcgagaggggggcacataggctactactacatggacgtctggggcaaagggaccacggtcaccgtctcctcagctagcactaaagggccttctgtatttcccttggccccgtccagcaaatcgacctcgggagggacagccgccctgggttgccttgtgaaagattatttccctgagccagttaccgtaagttggaacagtggggcgctgacaagtggtgtgcacacgtttcctgccgtcctgcaatcatcgggcttgtatagcctcagctctgtggtcactgtcccaagttcatcgctgggcactcagacgtatatttgcaatgtgaaccacaaaccttcaaatacaaaagtggataaacgcgtagaaccgaaatcgtgtgataaaactcacacatgcccgccatgcccggcacctgaactgcttggtggtcccagcgtgttcctgttcccgccgaagcctaaagatactctaatgatcagccgtacgccagaggtgacatgtgtcgtggttgacgtgtcccacgaagatcccgaagttaagttcaattggtatgttgatggtgtagaggtacacaatgctaagactaaacctcgcgaggagcagtacgcctcgacctatcgtgtcgtgagcgttctgaccgtccttcaccaagattggcttaacggcaaagaatataagtgcaaggtaagcaataaagcacttccggccccaatcgagaaaaccatttccaaggccaaaggtcaaccaagagaaccccaggtgtatactcttccgccttctcgtgaggaaatgactaaaaatcaagtatcccttacgtgtctggttaaaggtttttatcctagcgatattgctgttgaatgggaatcgaacggtcagccggagaataattataaaacaacgccacccgtcctggatagcgacggctcattttttctgtatagcaaactgactgtagataaatcacggtggcagcagggcaatgtattcagttgctccgttatgcatgaagcgttacataatcactacacgcagaaatctcttagtctttcacccggt

SEQ ID NO: 1383 - DNA, 1353 bp, Synthetic construct
  source 1..1353: mol_type = other DNA
gaggtgcagctggtgcagtctggagcagaggtgaaaaagcccggggagtctctgaagatctcctgtaagggttctggatacagctttaccaactactggatcggctgggtgcgccagatgcccgggaaaggcctggagtggatggggatcatctatcctggtgactctgataccatatacagcccgtccttccaaggccaggtcaccttctcagccgacaagtccatcaacaccgcctacctgcagtggagcagcctgaaggcctcggacaccgccatgtattactgtgcgagaggacgtggatatagtggctacgaaggtgcttttgatatctggggacaagggacaatggtcaccgtctcttcagctagcactaaagggccttctgtatttcccttggccccgtccagcaaatcgacctcgggagggacagccgccctgggttgccttgtgaaagattatttccctgagccagttaccgtaagttggaacagtggggcgctgacaagtggtgtgcacacgtttcctgccgtcctgcaatcatcgggcttgtatagcctcagctctgtggtcactgtcccaagttcatcgctgggcactcagacgtatatttgcaatgtgaaccacaaaccttcaaatacaaaagtggataaacgcgtagaaccgaaatcgtgtgataaaactcacacatgcccgccatgcccggcacctgaactgcttggtggtcccagcgtgttcctgttcccgccgaagcctaaagatactctaatgatcagccgtacgccagaggtgacatgtgtcgtggttgacgtgtcccacgaagatcccgaagttaagttcaattggtatgttgatggtgtagaggtacacaatgctaagactaaacctcgcgaggagcagtacgcctcgacctatcgtgtcgtgagcgttctgaccgtccttcaccaagattggcttaacggcaaagaatataagtgcaaggtaagcaataaagcacttccggccccaatcgagaaaaccatttccaaggccaaaggtcaaccaagagaaccccaggtgtatactcttccgccttctcgtgaggaaatgactaaaaatcaagtatcccttacgtgtctggttaaaggtttttatcctagcgatattgctgttgaatgggaatcgaacggtcagccggagaataattataaaacaacgccacccgtcctggatagcgacggctcattttttctgtatagcaaactgactgtagataaatcacggtggcagcagggcaatgtattcagttgctccgttatgcatgaagcgttacataatcactacacgcagaaatctcttagtctttcacccggt

SEQ ID NO: 1384 - DNA, 1335 bp, Synthetic construct
  source 1..1335: mol_type = other DNA
caggttcagctggtgcagtctggagctgaggtgaagaagcctggggcctcagtgaaggtctcctgcaaggcttctggttacacctttaccaactatggtatcagctgggtgcgacaggcccctggacaagggcttgagtggatgggatggatcagcgcttacaatggtaacacacactatgcacagaaactccagggcagagtcaccatgaccacagacacatccacgagcacagcctacatggagctgaggagcctgagatcagacgacacggccgtgtattactgtgcgagagcggcagcagccgttgactactggggccagggaaccctggtcaccgtctcttcagctagcactaaagggccttctgtatttcccttggccccgtccagcaaatcgacctcgggagggacagccgccctgggttgccttgtgaaagattatttccctgagccagttaccgtaagttggaacagtggggcgctgacaagtggtgtgcacacgtttcctgccgtcctgcaatcatcgggcttgtatagcctcagctctgtggtcactgtcccaagttcatcgctgggcactcagacgtatatttgcaatgtgaaccacaaaccttcaaatacaaaagtggataaacgcgtagaaccgaaatcgtgtgataaaactcacacatgcccgccatgcccggcacctgaactgcttggtggtcccagcgtgttcctgttcccgccgaagcctaaagatactctaatgatcagccgtacgccagaggtgacatgtgtcgtggttgacgtgtcccacgaagatcccgaagttaagttcaattggtatgttgatggtgtagaggtacacaatgctaagactaaacctcgcgaggagcagtacgcctcgacctatcgtgtcgtgagcgttctgaccgtccttcaccaagattggcttaacggcaaagaatataagtgcaaggtaagcaataaagcacttccggccccaatcgagaaaaccatttccaaggccaaaggtcaaccaagagaaccccaggtgtatactcttccgccttctcgtgaggaaatgactaaaaatcaagtatcccttacgtgtctggttaaaggtttttatcctagcgatattgctgttgaatgggaatcgaacggtcagccggagaataattataaaacaacgccacccgtcctggatagcgacggctcattttttctgtatagcaaactgactgtagataaatcacggtggcagcagggcaatgtattcagttgctccgttatgcatgaagcgttacataatcactacacgcagaaatctcttagtctttcacccggt

SEQ ID NO: 1385 - DNA, 1353 bp, Synthetic construct
  source 1..1353: mol_type = other DNA
caggtgcagctgcaggagtcgggtccaggactggtgaagccttcggagaccctgtccctcagttgcactgtctctggtggctccgtcagcagtggtagttactactggagctggatccggcagcccccagggaagggactggagtggattgggtatatctattacagtgggagcaccaagtacaacccctccctcaagagtcgagtcaccatatcagtagacacgtccaagaaccaggtctccctgaagctgagttctgtgaccgctgcggacacggccgtgtattactgtgcgagagataaggggcactggaactacggtgcttttgatatctggggacaagggacaatggtcaccgtctcttcagctagcactaaagggccttctgtatttcccttggccccgtccagcaaatcgacctcgggagggacagccgccctgggttgccttgtgaaagattatttccctgagccagttaccgtaagttggaacagtggggcgctgacaagtggtgtgcacacgtttcctgccgtcctgcaatcatcgggcttgtatagcctcagctctgtggtcactgtcccaagttcatcgctgggcactcagacgtatatttgcaatgtgaaccacaaaccttcaaatacaaaagtggataaacgcgtagaaccgaaatcgtgtgataaaactcacacatgcccgccatgcccggcacctgaactgcttggtggtcccagcgtgttcctgttcccgccgaagcctaaagatactctaatgatcagccgtacgccagaggtgacatgtgtcgtggttgacgtgtcccacgaagatcccgaagttaagttcaattggtatgttgatggtgtagaggtacacaatgctaagactaaacctcgcgaggagcagtacgcctcgacctatcgtgtcgtgagcgttctgaccgtccttcaccaagattggcttaacggcaaagaatataagtgcaaggtaagcaataaagcacttccggccccaatcgagaaaaccatttccaaggccaaaggtcaaccaagagaaccccaggtgtatactcttccgccttctcgtgaggaaatgactaaaaatcaagtatcccttacgtgtctggttaaaggtttttatcctagcgatattgctgttgaatgggaatcgaacggtcagccggagaataattataaaacaacgccacccgtcctggatagcgacggctcattttttctgtatagcaaactgactgtagataaatcacggtggcagcagggcaatgtattcagttgctccgttatgcatgaagcgttacataatcactacacgcagaaatctcttagtctttcacccggt

SEQ ID NO: 1386 - DNA, 1353 bp, Synthetic construct
  source 1..1353: mol_type = other DNA
caggtgcagctgcaggagtcgggcccaggactggtgaagccttcggggaccctgtccctcacctgcgctgtctctggtggctccatcagcagtaataactggtggagttgggtccgccagcccccagggaaggggctggagtggattggggaaatctatcatagtggaaatattaactacaacccgtccctcaagagtcgagtcaccatatcagtggacaagtccaagaaccagttctccctgaagctgagctctgtgaccgccgcggacacggccgtgtattactgtgcgagagggggggaatacggtgaccccgtggggtacttcgatctctggggccgtggcaccctggtcactgtctcctcagctagcactaaagggccttctgtatttcccttggccccgtccagcaaatcgacctcgggagggacagccgccctgggttgccttgtgaaagattatttccctgagccagttaccgtaagttggaacagtggggcgctgacaagtggtgtgcacacgtttcctgccgtcctgcaatcatcgggcttgtatagcctcagctctgtggtcactgtcccaagttcatcgctgggcactcagacgtatatttgcaatgtgaaccacaaaccttcaaatacaaaagtggataaacgcgtagaaccgaaatcgtgtgataaaactcacacatgcccgccatgcccggcacctgaactgcttggtggtcccagcgtgttcctgttcccgccgaagcctaaagatactctaatgatcagccgtacgccagaggtgacatgtgtcgtggttgacgtgtcccacgaagatcccgaagttaagttcaattggtatgttgatggtgtagaggtacacaatgctaagactaaacctcgcgaggagcagtacgcctcgacctatcgtgtcgtgagcgttctgaccgtccttcaccaagattggcttaacggcaaagaatataagtgcaaggtaagcaataaagcacttccggccccaatcgagaaaaccatttccaaggccaaaggtcaaccaagagaaccccaggtgtatactcttccgccttctcgtgaggaaatgactaaaaatcaagtatcccttacgtgtctggttaaaggtttttatcctagcgatattgctgttgaatgggaatcgaacggtcagccggagaataattataaaacaacgccacccgtcctggatagcgacggctcattttttctgtatagcaaactgactgtagataaatcacggtggcagcagggcaatgtattcagttgctccgttatgcatgaagcgttacataatcactacacgcagaaatctcttagtctttcacccggt

SEQ ID NO: 1387 - DNA, 1344 bp, Synthetic construct
  source 1..1344: mol_type = other DNA
caggttcagctggtgcagtctggagctgaggtgaagaagcctggggcctcagtgaaggtctcctgcaaggcttctggttacacctttaccacctatggtatcagctgggtgcgacaggcccctggacaagggcttgagtggatgggatggatcagcgcttacagtggtaacacaaactatgcacagaagctccagggcagagtcaccatgaccacagacacatccacgagcacagcctacatggagctgaggagcctgagatctgacgacacggccgtgtattactgtgcgagagagagagtctccaactgggtctttgacttctggggccagggaaccctggtcactgtctcctcagctagcactaaagggccttctgtatttcccttggccccgtccagcaaatcgacctcgggagggacagccgccctgggttgccttgtgaaagattatttccctgagccagttaccgtaagttggaacagtggggcgctgacaagtggtgtgcacacgtttcctgccgtcctgcaatcatcgggcttgtatagcctcagctctgtggtcactgtcccaagttcatcgctgggcactcagacgtatatttgcaatgtgaaccacaaaccttcaaatacaaaagtggataaacgcgtagaaccgaaatcgtgtgataaaactcacacatgcccgccatgcccggcacctgaactgcttggtggtcccagcgtgttcctgttcccgccgaagcctaaagatactctaatgatcagccgtacgccagaggtgacatgtgtcgtggttgacgtgtcccacgaagatcccgaagttaagttcaattggtatgttgatggtgtagaggtacacaatgctaagactaaacctcgcgaggagcagtacgcctcgacctatcgtgtcgtgagcgttctgaccgtccttcaccaagattggcttaacggcaaagaatataagtgcaaggtaagcaataaagcacttccggccccaatcgagaaaaccatttccaaggccaaaggtcaaccaagagaaccccaggtgtatactcttccgccttctcgtgaggaaatgactaaaaatcaagtatcccttacgtgtctggttaaaggtttttatcctagcgatattgctgttgaatgggaatcgaacggtcagccggagaataattataaaacaacgccacccgtcctggatagcgacggctcattttttctgtatagcaaactgactgtagataaatcacggtggcagcagggcaatgtattcagttgctccgttatgcatgaagcgttacataatcactacacgcagaaatctcttagtctttcacccggt

SEQ ID NO: 1388 - DNA, 1347 bp, Synthetic construct
  source 1..1347: mol_type = other DNA
caggtgcagctgcaggagtcgggcccaggactggtgaagccttcggggaccctgtccctcacctgcgctgtctctggtggttccatcagcagtagtgactggtggagctgggtccgccagcccccagggaaggggctggagtggattggggaaatctatcatagtaggaacaccaactacaacccgtccctcaagagtcgagtcaccatatcagtagacaagtccaagaaccagttctccctgaagctgagttctgtgaccgccgcggacacggccgtgtattactgtgcgagtggaggtgtggtggccgactactacatggacgtctggggcaaagggaccacggtcaccgtctcctcagctagcactaaagggccttctgtatttcccttggccccgtccagcaaatcgacctcgggagggacagccgccctgggttgccttgtgaaagattatttccctgagccagttaccgtaagttggaacagtggggcgctgacaagtggtgtgcacacgtttcctgccgtcctgcaatcatcgggcttgtatagcctcagctctgtggtcactgtcccaagttcatcgctgggcactcagacgtatatttgcaatgtgaaccacaaaccttcaaatacaaaagtggataaacgcgtagaaccgaaatcgtgtgataaaactcacacatgcccgccatgcccggcacctgaactgcttggtggtcccagcgtgttcctgttcccgccgaagcctaaagatactctaatgatcagccgtacgccagaggtgacatgtgtcgtggttgacgtgtcccacgaagatcccgaagttaagttcaattggtatgttgatggtgtagaggtacacaatgctaagactaaacctcgcgaggagcagtacgcctcgacctatcgtgtcgtgagcgttctgaccgtccttcaccaagattggcttaacggcaaagaatataagtgcaaggtaagcaataaagcacttccggccccaatcgagaaaaccatttccaaggccaaaggtcaaccaagagaaccccaggtgtatactcttccgccttctcgtgaggaaatgactaaaaatcaagtatcccttacgtgtctggttaaaggtttttatcctagcgatattgctgttgaatgggaatcgaacggtcagccggagaataattataaaacaacgccacccgtcctggatagcgacggctcattttttctgtatagcaaactgactgtagataaatcacggtggcagcagggcaatgtattcagttgctccgttatgcatgaagcgttacataatcactacacgcagaaatctcttagtctttcacccggt

SEQ ID NO: 1389 - DNA, 1356 bp, Synthetic construct
  source 1..1356: mol_type = other DNA
gaggtgcagctggtggagtctgggggaggcctggtcaagcctggggggtccctgagactctcctgtgcagcctctggattcaccttcagtagctatggcatgaactgggtccgccaggctccagggaaggggctggagtgggtctcatccattagtggttatggtagttacatatactacgcagcctcagtgaagggccgattcaccatctccagagacagcgccaagaactcactgtatctgcaaatgaacagcctgagcgccgaggacacagctgtgtattactgtgcgagagaattaggtgggatctactacggggtagggtacttcgatctctggggccgtggcaccctggtcactgtctcctcagctagcactaaagggccttctgtatttcccttggccccgtccagcaaatcgacctcgggagggacagccgccctgggttgccttgtgaaagattatttccctgagccagttaccgtaagttggaacagtggggcgctgacaagtggtgtgcacacgtttcctgccgtcctgcaatcatcgggcttgtatagcctcagctctgtggtcactgtcccaagttcatcgctgggcactcagacgtatatttgcaatgtgaaccacaaaccttcaaatacaaaagtggataaacgcgtagaaccgaaatcgtgtgataaaactcacacatgcccgccatgcccggcacctgaactgcttggtggtcccagcgtgttcctgttcccgccgaagcctaaagatactctaatgatcagccgtacgccagaggtgacatgtgtcgtggttgacgtgtcccacgaagatcccgaagttaagttcaattggtatgttgatggtgtagaggtacacaatgctaagactaaacctcgcgaggagcagtacgcctcgacctatcgtgtcgtgagcgttctgaccgtccttcaccaagattggcttaacggcaaagaatataagtgcaaggtaagcaataaagcacttccggccccaatcgagaaaaccatttccaaggccaaaggtcaaccaagagaaccccaggtgtatactcttccgccttctcgtgaggaaatgactaaaaatcaagtatcccttacgtgtctggttaaaggtttttatcctagcgatattgctgttgaatgggaatcgaacggtcagccggagaataattataaaacaacgccacccgtcctggatagcgacggctcattttttctgtatagcaaactgactgtagataaatcacggtggcagcagggcaatgtattcagttgctccgttatgcatgaagcgttacataatcactacacgcagaaatctcttagtctttcacccggt

SEQ ID NO: 1390 - DNA, 1353 bp, Synthetic construct
  source 1..1353: mol_type = other DNA
caggtgcagctgcaggagtcgggcccaggactggtgaagccttcggagaccctgtccctcacctgcgctgtctctggtggctccgtcagcagtggtaattactattggagctggatccggcagcccccagggaagggactggagtggattgggtatatctattccagtgggagcaccaactacaacccctccctcaagagtcgagtcaccatatcaatagacacgtccaagaaccagttctccctgaagctgagctctgtgaccgctgcggacacggccgtgtattactgtgcgagaagtcctcgtggatacagctatggtccctttgcctactggggccaggggaccctggtcaccgtctcttcagctagcactaaagggccttctgtatttcccttggccccgtccagcaaatcgacctcgggagggacagccgccctgggttgccttgtgaaagattatttccctgagccagttaccgtaagttggaacagtggggcgctgacaagtggtgtgcacacgtttcctgccgtcctgcaatcatcgggcttgtatagcctcagctctgtggtcactgtcccaagttcatcgctgggcactcagacgtatatttgcaatgtgaaccacaaaccttcaaatacaaaagtggataaacgcgtagaaccgaaatcgtgtgataaaactcacacatgcccgccatgcccggcacctgaactgcttggtggtcccagcgtgttcctgttcccgccgaagcctaaagatactctaatgatcagccgtacgccagaggtgacatgtgtcgtggttgacgtgtcccacgaagatcccgaagttaagttcaattggtatgttgatggtgtagaggtacacaatgctaagactaaacctcgcgaggagcagtacgcctcgacctatcgtgtcgtgagcgttctgaccgtccttcaccaagattggcttaacggcaaagaatataagtgcaaggtaagcaataaagcacttccggccccaatcgagaaaaccatttccaaggccaaaggtcaaccaagagaaccccaggtgtatactcttccgccttctcgtgaggaaatgactaaaaatcaagtatcccttacgtgtctggttaaaggtttttatcctagcgatattgctgttgaatgggaatcgaacggtcagccggagaataattataaaacaacgccacccgtcctggatagcgacggctcattttttctgtatagcaaactgactgtagataaatcacggtggcagcagggcaatgtattcagttgctccgttatgcatgaagcgttacataatcactacacgcagaaatctcttagtctttcacccggt

SEQ ID NO: 1391 - DNA, 1353 bp, Synthetic construct
  source 1..1353: mol_type = other DNA
caggtgcagctgcaggagtcgggcccaggactggtgaagccttcacagaccctgtccctcacctgcactgtctctggtggctccatcagcagtggtggttacaactggaactggatccgccagcacccagggaagggcctggaatggattgggtacatcaattacagtgggaatacctattacaacccgtccctcaagagtcgagttaccatatcagtagacacgtctaagaaccagttctccctgaagctgagttctgtgactgccgcggacacggccgtttattactgtgcgagagggcccctggatacagctatggccccctttgactactggggccagggaaccctggtcaccgtctcctcagctagcactaaagggccttctgtatttcccttggccccgtccagcaaatcgacctcgggagggacagccgccctgggttgccttgtgaaagattatttccctgagccagttaccgtaagttggaacagtggggcgctgacaagtggtgtgcacacgtttcctgccgtcctgcaatcatcgggcttgtatagcctcagctctgtggtcactgtcccaagttcatcgctgggcactcagacgtatatttgcaatgtgaaccacaaaccttcaaatacaaaagtggataaacgcgtagaaccgaaatcgtgtgataaaactcacacatgcccgccatgcccggcacctgaactgcttggtggtcccagcgtgttcctgttcccgccgaagcctaaagatactctaatgatcagccgtacgccagaggtgacatgtgtcgtggttgacgtgtcccacgaagatcccgaagttaagttcaattggtatgttgatggtgtagaggtacacaatgctaagactaaacctcgcgaggagcagtacgcctcgacctatcgtgtcgtgagcgttctgaccgtccttcaccaagattggcttaacggcaaagaatataagtgcaaggtaagcaataaagcacttccggccccaatcgagaaaaccatttccaaggccaaaggtcaaccaagagaaccccaggtgtatactcttccgccttctcgtgaggaaatgactaaaaatcaagtatcccttacgtgtctggttaaaggtttttatcctagcgatattgctgttgaatgggaatcgaacggtcagccggagaataattataaaacaacgccacccgtcctggatagcgacggctcattttttctgtatagcaaactgactgtagataaatcacggtggcagcagggcaatgtattcagttgctccgttatgcatgaagcgttacataatcactacacgcagaaatctcttagtctttcacccggt

SEQ ID NO: 1392 - DNA, 1347 bp, Synthetic construct
  source 1..1347: mol_type = other DNA
caggtgcagctgcaggagtcgggcccaggactggtgaagccttcggagaccctgtccctcacctgtactgtctctggtgactccatcagtagttactactggagttggatccggcagcccccagggaagggactggagtggattggatatatctattatagtgggttcaccaagtacaacccctccctcaagagtcgagtcaccatttcagtagacacgtccaagaaccagttctccctgaggctgagctctgtgaccgctgcggacacggccgtgtattactgtgcgagcgtcgattcaaagtggaactacgggtcttttcatatctggggacaagggacaatggtcaccgtctcttcagctagcactaaagggccttctgtatttcccttggccccgtccagcaaatcgacctcgggagggacagccgccctgggttgccttgtgaaagattatttccctgagccagttaccgtaagttggaacagtggggcgctgacaagtggtgtgcacacgtttcctgccgtcctgcaatcatcgggcttgtatagcctcagctctgtggtcactgtcccaagttcatcgctgggcactcagacgtatatttgcaatgtgaaccacaaaccttcaaatacaaaagtggataaacgcgtagaaccgaaatcgtgtgataaaactcacacatgcccgccatgcccggcacctgaactgcttggtggtcccagcgtgttcctgttcccgccgaagcctaaagatactctaatgatcagccgtacgccagaggtgacatgtgtcgtggttgacgtgtcccacgaagatcccgaagttaagttcaattggtatgttgatggtgtagaggtacacaatgctaagactaaacctcgcgaggagcagtacgcctcgacctatcgtgtcgtgagcgttctgaccgtccttcaccaagattggcttaacggcaaagaatataagtgcaaggtaagcaataaagcacttccggccccaatcgagaaaaccatttccaaggccaaaggtcaaccaagagaaccccaggtgtatactcttccgccttctcgtgaggaaatgactaaaaatcaagtatcccttacgtgtctggttaaaggtttttatcctagcgatattgctgttgaatgggaatcgaacggtcagccggagaataattataaaacaacgccacccgtcctggatagcgacggctcattttttctgtatagcaaactgactgtagataaatcacggtggcagcagggcaatgtattcagttgctccgttatgcatgaagcgttacataatcactacacgcagaaatctcttagtctttcacccggt

SEQ ID NO: 1393 - DNA, 1362 bp, Synthetic construct
  source 1..1362: mol_type = other DNA
caggtgcagctgcaggagtcgggcccagggctggtgaagccttcggagaccctgtccctcacctgctctgtctctggtgactccgtcagcaataatcgttattattggagctggattcggcagcccccagggaagggactggagtggattgggtatatctattacagtgggagcaccaactacaacccctccctcaagagtcgagtcaccatatcagtagacacgtccaagaaccagttgtccctgaacctgagttctgtgaccgctgcggacacggccgtgtattactgtgcgagagatcgcccatcccggtataagtggaattacgatgcttttgctatctggggacaagggacaatggtcaccgtctcttcagctagcactaaagggccttctgtatttcccttggccccgtccagcaaatcgacctcgggagggacagccgccctgggttgccttgtgaaagattatttccctgagccagttaccgtaagttggaacagtggggcgctgacaagtggtgtgcacacgtttcctgccgtcctgcaatcatcgggcttgtatagcctcagctctgtggtcactgtcccaagttcatcgctgggcactcagacgtatatttgcaatgtgaaccacaaaccttcaaatacaaaagtggataaacgcgtagaaccgaaatcgtgtgataaaactcacacatgcccgccatgcccggcacctgaactgcttggtggtcccagcgtgttcctgttcccgccgaagcctaaagatactctaatgatcagccgtacgccagaggtgacatgtgtcgtggttgacgtgtcccacgaagatcccgaagttaagttcaattggtatgttgatggtgtagaggtacacaatgctaagactaaacctcgcgaggagcagtacgcctcgacctatcgtgtcgtgagcgttctgaccgtccttcaccaagattggcttaacggcaaagaatataagtgcaaggtaagcaataaagcacttccggccccaatcgagaaaaccatttccaaggccaaaggtcaaccaagagaaccccaggtgtatactcttccgccttctcgtgaggaaatgactaaaaatcaagtatcccttacgtgtctggttaaaggtttttatcctagcgatattgctgttgaatgggaatcgaacggtcagccggagaataattataaaacaacgccacccgtcctggatagcgacggctcattttttctgtatagcaaactgactgtagataaatcacggtggcagcagggcaatgtattcagttgctccgttatgcatgaagcgttacataatcactacacgcagaaatctcttagtctttcacccggt

SEQ ID NO: 1394 - DNA, 1344 bp, Synthetic construct
  source 1..1344: mol_type = other DNA
caggtgcagctacagcagtggggcgcaggactgttgaagccttcggagaccctgtccctcacctgcgctgtctatggtgggtccttcagtgattactactggacctggatccgccagcccccagggaaggggctggagtggattggtgaagtcaatcatattggaagcaccaactacaacccgtccctcaagagtcgagtcaccatatcagtagacacgtccaagaaccagttctccctgaacctgagctctgtgaccgccgcggacacggctgtgtattactgtgcgaagtatagcacttcctggtacggctggttcgacccctggggccagggaaccctggtcactgtctcctcagctagcactaaagggccttctgtatttcccttggccccgtccagcaaatcgacctcgggagggacagccgccctgggttgccttgtgaaagattatttccctgagccagttaccgtaagttggaacagtggggcgctgacaagtggtgtgcacacgtttcctgccgtcctgcaatcatcgggcttgtatagcctcagctctgtggtcactgtcccaagttcatcgctgggcactcagacgtatatttgcaatgtgaaccacaaaccttcaaatacaaaagtggataaacgcgtagaaccgaaatcgtgtgataaaactcacacatgcccgccatgcccggcacctgaactgcttggtggtcccagcgtgttcctgttcccgccgaagcctaaagatactctaatgatcagccgtacgccagaggtgacatgtgtcgtggttgacgtgtcccacgaagatcccgaagttaagttcaattggtatgttgatggtgtagaggtacacaatgctaagactaaacctcgcgaggagcagtacgcctcgacctatcgtgtcgtgagcgttctgaccgtccttcaccaagattggcttaacggcaaagaatataagtgcaaggtaagcaataaagcacttccggccccaatcgagaaaaccatttccaaggccaaaggtcaaccaagagaaccccaggtgtatactcttccgccttctcgtgaggaaatgactaaaaatcaagtatcccttacgtgtctggttaaaggtttttatcctagcgatattgctgttgaatgggaatcgaacggtcagccggagaataattataaaacaacgccacccgtcctggatagcgacggctcattttttctgtatagcaaactgactgtagataaatcacggtggcagcagggcaatgtattcagttgctccgttatgcatgaagcgttacataatcactacacgcagaaatctcttagtctttcacccggt

SEQ ID NO: 1395 - DNA, 1353 bp, Synthetic construct
  source 1..1353: mol_type = other DNA
caggtgcagctgcaggagtcgggcccagggctggtgaagccttcggggaccctgtccctcacctgcgctgtctctggtgactccatcagcagtaataactggtggagttggttccgccagcccccagggaagggactggagtggattgggagaatctatcatagtgggaccaccaactacaacccgtccctcgagagtcgagtcaccatatcagtagacaactccaggaaccagttctccctgaaactgagctctgtgaccgccgcggacacggccgtgtattactgtgcgagaggcgaggagtgggagctgcggggaggtgtttttgatatctggggacaagggacaatggtcaccgtctcttcagctagcactaaagggccttctgtatttcccttggccccgtccagcaaatcgacctcgggagggacagccgccctgggttgccttgtgaaagattatttccctgagccagttaccgtaagttggaacagtggggcgctgacaagtggtgtgcacacgtttcctgccgtcctgcaatcatcgggcttgtatagcctcagctctgtggtcactgtcccaagttcatcgctgggcactcagacgtatatttgcaatgtgaaccacaaaccttcaaatacaaaagtggataaacgcgtagaaccgaaatcgtgtgataaaactcacacatgcccgccatgcccggcacctgaactgcttggtggtcccagcgtgttcctgttcccgccgaagcctaaagatactctaatgatcagccgtacgccagaggtgacatgtgtcgtggttgacgtgtcccacgaagatcccgaagttaagttcaattggtatgttgatggtgtagaggtacacaatgctaagactaaacctcgcgaggagcagtacgcctcgacctatcgtgtcgtgagcgttctgaccgtccttcaccaagattggcttaacggcaaagaatataagtgcaaggtaagcaataaagcacttccggccccaatcgagaaaaccatttccaaggccaaaggtcaaccaagagaaccccaggtgtatactcttccgccttctcgtgaggaaatgactaaaaatcaagtatcccttacgtgtctggttaaaggtttttatcctagcgatattgctgttgaatgggaatcgaacggtcagccggagaataattataaaacaacgccacccgtcctggatagcgacggctcattttttctgtatagcaaactgactgtagataaatcacggtggcagcagggcaatgtattcagttgctccgttatgcatgaagcgttacataatcactacacgcagaaatctcttagtctttcacccggt

SEQ ID NO: 1396 - DNA, 1335 bp, Synthetic construct
  source 1..1335: mol_type = other DNA
caggtgcagctggtgcaatctgggcctgagttgaagaagcctggggcctcagtaaaggtttcctgcaaggcttctggatacaccttcactaactatgctgtgaattgggtgcgacaggcccctggacaagggcttgagtggatgggatggatcaacaccaacactgggcacccaacgtatgcccagggcttcacaggacggtttgtcttctccttggacacctctgtcagtacggcatatctgcagatcagcagcctaaaggctgaggacactgccgtttattactgtgcgagagacagcagcagctggggctactggggccagggaaccctggtcactgtctcctcagctagcactaaagggccttctgtatttcccttggccccgtccagcaaatcgacctcgggagggacagccgccctgggttgccttgtgaaagattatttccctgagccagttaccgtaagttggaacagtggggcgctgacaagtggtgtgcacacgtttcctgccgtcctgcaatcatcgggcttgtatagcctcagctctgtggtcactgtcccaagttcatcgctgggcactcagacgtatatttgcaatgtgaaccacaaaccttcaaatacaaaagtggataaacgcgtagaaccgaaatcgtgtgataaaactcacacatgcccgccatgcccggcacctgaactgcttggtggtcccagcgtgttcctgttcccgccgaagcctaaagatactctaatgatcagccgtacgccagaggtgacatgtgtcgtggttgacgtgtcccacgaagatcccgaagttaagttcaattggtatgttgatggtgtagaggtacacaatgctaagactaaacctcgcgaggagcagtacgcctcgacctatcgtgtcgtgagcgttctgaccgtccttcaccaagattggcttaacggcaaagaatataagtgcaaggtaagcaataaagcacttccggccccaatcgagaaaaccatttccaaggccaaaggtcaaccaagagaaccccaggtgtatactcttccgccttctcgtgaggaaatgactaaaaatcaagtatcccttacgtgtctggttaaaggtttttatcctagcgatattgctgttgaatgggaatcgaacggtcagccggagaataattataaaacaacgccacccgtcctggatagcgacggctcattttttctgtatagcaaactgactgtagataaatcacggtggcagcagggcaatgtattcagttgctccgttatgcatgaagcgttacataatcactacacgcagaaatctcttagtctttcacccggt

SEQ ID NO: 1397 - DNA, 1344 bp, Synthetic construct
  source 1..1344: mol_type = other DNA
caggtgcagctgcaggagtcgggcccaggactggtgacgccttcggggaccctgtccctcacctgcgctgtctctggtgactccatcagtagtgataactggtggagttgggtccgccagcccccagggaagggactggagtggattggggaaatctatcacagtgaaaacaccaactacaacccgtccctcaagagtcgagtcaccatatcagtagacaagtccaagaaccagttctccctgaggctgaactctgtgaccgccgcggacacggccatgtattactgtgcgagagggagggagctaactggcctctttgactactggggccagggaaccctggtcaccgtctcctcagctagcactaaagggccttctgtatttcccttggccccgtccagcaaatcgacctcgggagggacagccgccctgggttgccttgtgaaagattatttccctgagccagttaccgtaagttggaacagtggggcgctgacaagtggtgtgcacacgtttcctgccgtcctgcaatcatcgggcttgtatagcctcagctctgtggtcactgtcccaagttcatcgctgggcactcagacgtatatttgcaatgtgaaccacaaaccttcaaatacaaaagtggataaacgcgtagaaccgaaatcgtgtgataaaactcacacatgcccgccatgcccggcacctgaactgcttggtggtcccagcgtgttcctgttcccgccgaagcctaaagatactctaatgatcagccgtacgccagaggtgacatgtgtcgtggttgacgtgtcccacgaagatcccgaagttaagttcaattggtatgttgatggtgtagaggtacacaatgctaagactaaacctcgcgaggagcagtacgcctcgacctatcgtgtcgtgagcgttctgaccgtccttcaccaagattggcttaacggcaaagaatataagtgcaaggtaagcaataaagcacttccggccccaatcgagaaaaccatttccaaggccaaaggtcaaccaagagaaccccaggtgtatactcttccgccttctcgtgaggaaatgactaaaaatcaagtatcccttacgtgtctggttaaaggtttttatcctagcgatattgctgttgaatgggaatcgaacggtcagccggagaataattataaaacaacgccacccgtcctggatagcgacggctcattttttctgtatagcaaactgactgtagataaatcacggtggcagcagggcaatgtattcagttgctccgttatgcatgaagcgttacataatcactacacgcagaaatctcttagtctttcacccggt

SEQ ID NO: 1398 - DNA, 1347 bp, Synthetic construct
  source 1..1347: mol_type = other DNA
caggtgcagctgcaggagtcgggcccaggactggtgaagccttcggggaccctgtccctcacctgcgctgtctctggtggctccatcagcagtaataactggtggagttgggtccgccagcccccaggaaagggactggaatggattggggacatctatcatagtggaaacaccaactacaacccgtccctcaagagtcgagtcaccctatcagtagacatgtccaagaaccagttctccctgaaactgaactctgtgaccgccgcggacacggccgtgtattactgtgcgagaggaggtatagcagtgactgcctactttgactactggggccagggaaccctggtcaccgtctcctcagctagcactaaagggccttctgtatttcccttggccccgtccagcaaatcgacctcgggagggacagccgccctgggttgccttgtgaaagattatttccctgagccagttaccgtaagttggaacagtggggcgctgacaagtggtgtgcacacgtttcctgccgtcctgcaatcatcgggcttgtatagcctcagctctgtggtcactgtcccaagttcatcgctgggcactcagacgtatatttgcaatgtgaaccacaaaccttcaaatacaaaagtggataaacgcgtagaaccgaaatcgtgtgataaaactcacacatgcccgccatgcccggcacctgaactgcttggtggtcccagcgtgttcctgttcccgccgaagcctaaagatactctaatgatcagccgtacgccagaggtgacatgtgtcgtggttgacgtgtcccacgaagatcccgaagttaagttcaattggtatgttgatggtgtagaggtacacaatgctaagactaaacctcgcgaggagcagtacgcctcgacctatcgtgtcgtgagcgttctgaccgtccttcaccaagattggcttaacggcaaagaatataagtgcaaggtaagcaataaagcacttccggccccaatcgagaaaaccatttccaaggccaaaggtcaaccaagagaaccccaggtgtatactcttccgccttctcgtgaggaaatgactaaaaatcaagtatcccttacgtgtctggttaaaggtttttatcctagcgatattgctgttgaatgggaatcgaacggtcagccggagaataattataaaacaacgccacccgtcctggatagcgacggctcattttttctgtatagcaaactgactgtagataaatcacggtggcagcagggcaatgtattcagttgctccgttatgcatgaagcgttacataatcactacacgcagaaatctcttagtctttcacccggt

SEQ ID NO: 1399 - DNA, 1353 bp, Synthetic construct
  source 1..1353: mol_type = other DNA
caggtgcagctggtgcagtctggggctgaggtgaagaagcctggggcctcagtgaaggtctcctgcaaggcttctggatacaccttcaccggctactatttgcactgggtgcgacaggcccctggacaagggcttgagtggatgggatggatcaaccctcacagtggtggcacaatctatgcacagaagtttcaggacagggtcaccatgaccagggacacgtccatcagcacagcctacatggagctgagcaggctgagatctgacgacacggccgtgtattactgtgcgaactggaactccggggactcctactactactacatggacgtctggggcaaagggaccacggtcaccgtctcctcagctagcactaaagggccttctgtatttcccttggccccgtccagcaaatcgacctcgggagggacagccgccctgggttgccttgtgaaagattatttccctgagccagttaccgtaagttggaacagtggggcgctgacaagtggtgtgcacacgtttcctgccgtcctgcaatcatcgggcttgtatagcctcagctctgtggtcactgtcccaagttcatcgctgggcactcagacgtatatttgcaatgtgaaccacaaaccttcaaatacaaaagtggataaacgcgtagaaccgaaatcgtgtgataaaactcacacatgcccgccatgcccggcacctgaactgcttggtggtcccagcgtgttcctgttcccgccgaagcctaaagatactctaatgatcagccgtacgccagaggtgacatgtgtcgtggttgacgtgtcccacgaagatcccgaagttaagttcaattggtatgttgatggtgtagaggtacacaatgctaagactaaacctcgcgaggagcagtacgcctcgacctatcgtgtcgtgagcgttctgaccgtccttcaccaagattggcttaacggcaaagaatataagtgcaaggtaagcaataaagcacttccggccccaatcgagaaaaccatttccaaggccaaaggtcaaccaagagaaccccaggtgtatactcttccgccttctcgtgaggaaatgactaaaaatcaagtatcccttacgtgtctggttaaaggtttttatcctagcgatattgctgttgaatgggaatcgaacggtcagccggagaataattataaaacaacgccacccgtcctggatagcgacggctcattttttctgtatagcaaactgactgtagataaatcacggtggcagcagggcaatgtattcagttgctccgttatgcatgaagcgttacataatcactacacgcagaaatctcttagtctttcacccggt

SEQ ID NO: 1400 - DNA, 1350 bp, Synthetic construct
  source 1..1350: mol_type = other DNA
caggtgcagctgcaggagtcgggcccaggactggtgaagccttcggggaccctgtccctcacctgcgctgtctctggtggttccatcagcagtgataactggtggaattgggtccgccagcccccagggaaggggctggagtggattggaaaaatctatcatagtgggaacaccaactacaacccgtccctcaagagtcgagtcaccatatcagtagacgagtccaagaaccagttctccctgaggctgtactctgtgaccgccgcggacacggccgtgtattactgtgcgagaggggtcgatttttggagtggttcccacatggacgtctggggcaaagggaccacggtcaccgtctcctcagctagcactaaagggccttctgtatttcccttggccccgtccagcaaatcgacctcgggagggacagccgccctgggttgccttgtgaaagattatttccctgagccagttaccgtaagttggaacagtggggcgctgacaagtggtgtgcacacgtttcctgccgtcctgcaatcatcgggcttgtatagcctcagctctgtggtcactgtcccaagttcatcgctgggcactcagacgtatatttgcaatgtgaaccacaaaccttcaaatacaaaagtggataaacgcgtagaaccgaaatcgtgtgataaaactcacacatgcccgccatgcccggcacctgaactgcttggtggtcccagcgtgttcctgttcccgccgaagcctaaagatactctaatgatcagccgtacgccagaggtgacatgtgtcgtggttgacgtgtcccacgaagatcccgaagttaagttcaattggtatgttgatggtgtagaggtacacaatgctaagactaaacctcgcgaggagcagtacgcctcgacctatcgtgtcgtgagcgttctgaccgtccttcaccaagattggcttaacggcaaagaatataagtgcaaggtaagcaataaagcacttccggccccaatcgagaaaaccatttccaaggccaaaggtcaaccaagagaaccccaggtgtatactcttccgccttctcgtgaggaaatgactaaaaatcaagtatcccttacgtgtctggttaaaggtttttatcctagcgatattgctgttgaatgggaatcgaacggtcagccggagaataattataaaacaacgccacccgtcctggatagcgacggctcattttttctgtatagcaaactgactgtagataaatcacggtggcagcagggcaatgtattcagttgctccgttatgcatgaagcgttacataatcactacacgcagaaatctcttagtctttcacccggt

SEQ ID NO: 1401 - DNA, 1347 bp, Synthetic construct
  source 1..1347: mol_type = other DNA
caggtgcagctgcaggagtcgggcccaggactggtgaagccttcggggaccctgtccctcacctgcgctgtctctggtggctccattagcagtaataattggtggagttgggtccgccaggccccagggaaggggctggagtggattgggaagatctatcaaagtgggagcaccatgtacaacccgtccctcaagagtcgagtcaccatgtcggtagacaagtccaagaaccagttctccctgattctgagttctgtgaccgccgcggacacggccgtgtattactgtgcgagagataaaccccctttactgggagcctttgactactggggccagggaaccctggtcactgtctcctcagctagcactaaagggccttctgtatttcccttggccccgtccagcaaatcgacctcgggagggacagccgccctgggttgccttgtgaaagattatttccctgagccagttaccgtaagttggaacagtggggcgctgacaagtggtgtgcacacgtttcctgccgtcctgcaatcatcgggcttgtatagcctcagctctgtggtcactgtcccaagttcatcgctgggcactcagacgtatatttgcaatgtgaaccacaaaccttcaaatacaaaagtggataaacgcgtagaaccgaaatcgtgtgataaaactcacacatgcccgccatgcccggcacctgaactgcttggtggtcccagcgtgttcctgttcccgccgaagcctaaagatactctaatgatcagccgtacgccagaggtgacatgtgtcgtggttgacgtgtcccacgaagatcccgaagttaagttcaattggtatgttgatggtgtagaggtacacaatgctaagactaaacctcgcgaggagcagtacgcctcgacctatcgtgtcgtgagcgttctgaccgtccttcaccaagattggcttaacggcaaagaatataagtgcaaggtaagcaataaagcacttccggccccaatcgagaaaaccatttccaaggccaaaggtcaaccaagagaaccccaggtgtatactcttccgccttctcgtgaggaaatgactaaaaatcaagtatcccttacgtgtctggttaaaggtttttatcctagcgatattgctgttgaatgggaatcgaacggtcagccggagaataattataaaacaacgccacccgtcctggatagcgacggctcattttttctgtatagcaaactgactgtagataaatcacggtggcagcagggcaatgtattcagttgctccgttatgcatgaagcgttacataatcactacacgcagaaatctcttagtctttcacccggt

SEQ ID NO: 1402 - DNA, 1347 bp, Synthetic construct
  source 1..1347: mol_type = other DNA
caggtgcagctggtggagtctgggggaggcgtggtccagcctgggaggtccctgagactctcctgtgcagcctctggattcaccttcagtagctatgccatgcactgggtccgccaggctccaggcaaggggctggagtgggtggcagttatatcatatgatggaagtaataaatactatgcggactccgtgaagggccgattcaccatctccagagacaattccaagaacacgctgtctctgcaaatgaacagcctgagagctgaggacacggctgtgtattactgtgcgaaaagggggggatacagctatggtccttttgaacactggggccagggaaccctggtcaccgtctcctcagctagcactaaagggccttctgtatttcccttggccccgtccagcaaatcgacctcgggagggacagccgccctgggttgccttgtgaaagattatttccctgagccagttaccgtaagttggaacagtggggcgctgacaagtggtgtgcacacgtttcctgccgtcctgcaatcatcgggcttgtatagcctcagctctgtggtcactgtcccaagttcatcgctgggcactcagacgtatatttgcaatgtgaaccacaaaccttcaaatacaaaagtggataaacgcgtagaaccgaaatcgtgtgataaaactcacacatgcccgccatgcccggcacctgaactgcttggtggtcccagcgtgttcctgttcccgccgaagcctaaagatactctaatgatcagccgtacgccagaggtgacatgtgtcgtggttgacgtgtcccacgaagatcccgaagttaagttcaattggtatgttgatggtgtagaggtacacaatgctaagactaaacctcgcgaggagcagtacgcctcgacctatcgtgtcgtgagcgttctgaccgtccttcaccaagattggcttaacggcaaagaatataagtgcaaggtaagcaataaagcacttccggccccaatcgagaaaaccatttccaaggccaaaggtcaaccaagagaaccccaggtgtatactcttccgccttctcgtgaggaaatgactaaaaatcaagtatcccttacgtgtctggttaaaggtttttatcctagcgatattgctgttgaatgggaatcgaacggtcagccggagaataattataaaacaacgccacccgtcctggatagcgacggctcattttttctgtatagcaaactgactgtagataaatcacggtggcagcagggcaatgtattcagttgctccgttatgcatgaagcgttacataatcactacacgcagaaatctcttagtctttcacccggt

SEQ ID NO: 1403 - DNA, 1341 bp, Synthetic construct
  source 1..1341: mol_type = other DNA
caggtgcagctggtgcaatctgggtctgaattgaagaagcctggggcctcagtgaaggtttcctgcaaggcttctggatacaccttcactagctatactatgaattgggtgcgacaggcccctggacaagggcttgagtgggtgggatggatcaacaccgccactgggaccccaacgtatgcccagggcttcacaggacggtatgtcttctccttggacacctctgtcagcacggcttatctgcagatcagcggcctaaaggctgaggacactgccgtgtatttctgtgcgaggtatagtgggagccactcctttgactactggggccagggaaccctggtcaccgtctcttcagctagcactaaagggccttctgtatttcccttggccccgtccagcaaatcgacctcgggagggacagccgccctgggttgccttgtgaaagattatttccctgagccagttaccgtaagttggaacagtggggcgctgacaagtggtgtgcacacgtttcctgccgtcctgcaatcatcgggcttgtatagcctcagctctgtggtcactgtcccaagttcatcgctgggcactcagacgtatatttgcaatgtgaaccacaaaccttcaaatacaaaagtggataaacgcgtagaaccgaaatcgtgtgataaaactcacacatgcccgccatgcccggcacctgaactgcttggtggtcccagcgtgttcctgttcccgccgaagcctaaagatactctaatgatcagccgtacgccagaggtgacatgtgtcgtggttgacgtgtcccacgaagatcccgaagttaagttcaattggtatgttgatggtgtagaggtacacaatgctaagactaaacctcgcgaggagcagtacgcctcgacctatcgtgtcgtgagcgttctgaccgtccttcaccaagattggcttaacggcaaagaatataagtgcaaggtaagcaataaagcacttccggccccaatcgagaaaaccatttccaaggccaaaggtcaaccaagagaaccccaggtgtatactcttccgccttctcgtgaggaaatgactaaaaatcaagtatcccttacgtgtctggttaaaggtttttatcctagcgatattgctgttgaatgggaatcgaacggtcagccggagaataattataaaacaacgccacccgtcctggatagcgacggctcattttttctgtatagcaaactgactgtagataaatcacggtggcagcagggcaatgtattcagttgctccgttatgcatgaagcgttacataatcactacacgcagaaatctcttagtctttcacccggt

SEQ ID NO: 1404 - DNA, 1344 bp, Synthetic construct
  source 1..1344: mol_type = other DNA
caggtgcagctgcaggagtcgggcccaggactggtgaagccttcggggaccctgtccctcacctgcgctgtctctggtggctccatcagtagtgattactggtggagttgggtccgccagtccccagggaaggggctggagtggattgggaaaatctatcatagtgggaacaccaaccacaacccgtccctcaagagtcgagtcaccatatcaatagacaagtccaggaaccagttctccctgaatctgaactctgtgaccgccgcggacacggccgtgtattactgtgcgagagaaggactggaacttccccacatggacgtctggggcaaagggaccacggtcaccgtctcctcagctagcactaaagggccttctgtatttcccttggccccgtccagcaaatcgacctcgggagggacagccgccctgggttgccttgtgaaagattatttccctgagccagttaccgtaagttggaacagtggggcgctgacaagtggtgtgcacacgtttcctgccgtcctgcaatcatcgggcttgtatagcctcagctctgtggtcactgtcccaagttcatcgctgggcactcagacgtatatttgcaatgtgaaccacaaaccttcaaatacaaaagtggataaacgcgtagaaccgaaatcgtgtgataaaactcacacatgcccgccatgcccggcacctgaactgcttggtggtcccagcgtgttcctgttcccgccgaagcctaaagatactctaatgatcagccgtacgccagaggtgacatgtgtcgtggttgacgtgtcccacgaagatcccgaagttaagttcaattggtatgttgatggtgtagaggtacacaatgctaagactaaacctcgcgaggagcagtacgcctcgacctatcgtgtcgtgagcgttctgaccgtccttcaccaagattggcttaacggcaaagaatataagtgcaaggtaagcaataaagcacttccggccccaatcgagaaaaccatttccaaggccaaaggtcaaccaagagaaccccaggtgtatactcttccgccttctcgtgaggaaatgactaaaaatcaagtatcccttacgtgtctggttaaaggtttttatcctagcgatattgctgttgaatgggaatcgaacggtcagccggagaataattataaaacaacgccacccgtcctggatagcgacggctcattttttctgtatagcaaactgactgtagataaatcacggtggcagcagggcaatgtattcagttgctccgttatgcatgaagcgttacataatcactacacgcagaaatctcttagtctttcacccggt

SEQ ID NO: 1405 - DNA, 1347 bp, Synthetic construct
  source 1..1347: mol_type = other DNA
caggtgcagctggtggagtctgggggaggcttggtccagcctgggaggtccctgagactctcctgtgcagcctctggattcaccttcagtagttatgctatgcactgggtccgccaggctccaggcaaggggctggagtgggtgacagttatatcatatgatggaagtaataaatactatgcagactccgtgaagggccgattcaccatctccagagacaattccaagaacacgctgtatctgcaaatgaacagcctgagagctgaggacacggctgtgtattactgtgcgaaaaggggtaactggaactacggaccttttcactactggggccagggaaccctggtcactgtctcctcagctagcactaaagggccttctgtatttcccttggccccgtccagcaaatcgacctcgggagggacagccgccctgggttgccttgtgaaagattatttccctgagccagttaccgtaagttggaacagtggggcgctgacaagtggtgtgcacacgtttcctgccgtcctgcaatcatcgggcttgtatagcctcagctctgtggtcactgtcccaagttcatcgctgggcactcagacgtatatttgcaatgtgaaccacaaaccttcaaatacaaaagtggataaacgcgtagaaccgaaatcgtgtgataaaactcacacatgcccgccatgcccggcacctgaactgcttggtggtcccagcgtgttcctgttcccgccgaagcctaaagatactctaatgatcagccgtacgccagaggtgacatgtgtcgtggttgacgtgtcccacgaagatcccgaagttaagttcaattggtatgttgatggtgtagaggtacacaatgctaagactaaacctcgcgaggagcagtacgcctcgacctatcgtgtcgtgagcgttctgaccgtccttcaccaagattggcttaacggcaaagaatataagtgcaaggtaagcaataaagcacttccggccccaatcgagaaaaccatttccaaggccaaaggtcaaccaagagaaccccaggtgtatactcttccgccttctcgtgaggaaatgactaaaaatcaagtatcccttacgtgtctggttaaaggtttttatcctagcgatattgctgttgaatgggaatcgaacggtcagccggagaataattataaaacaacgccacccgtcctggatagcgacggctcattttttctgtatagcaaactgactgtagataaatcacggtggcagcagggcaatgtattcagttgctccgttatgcatgaagcgttacataatcactacacgcagaaatctcttagtctttcacccggt

SEQ ID NO: 1406 - DNA, 1332 bp, Synthetic construct
  source 1..1332: mol_type = other DNA
caggtgcagctggtggagtctgggggaggcgtggtccagcctgggaggtccctgagactctcctgtgcagcctctggattcaccttcagtgcctatgccatccactgggtccgccaggctccaggcaaggggctggagtgggtggcagttatatcatatgatggaagtaataaaaagtatgcagactccgtgaagggccgattcaccatctccagagacaattccaagaacacgctggatctggaaatgaacagcctgagagctgaggacacggctgtgtactactgtgcgaaagggctaccttttgactactggggccagggaaccctggtcaccgtctcctcagctagcactaaagggccttctgtatttcccttggccccgtccagcaaatcgacctcgggagggacagccgccctgggttgccttgtgaaagattatttccctgagccagttaccgtaagttggaacagtggggcgctgacaagtggtgtgcacacgtttcctgccgtcctgcaatcatcgggcttgtatagcctcagctctgtggtcactgtcccaagttcatcgctgggcactcagacgtatatttgcaatgtgaaccacaaaccttcaaatacaaaagtggataaacgcgtagaaccgaaatcgtgtgataaaactcacacatgcccgccatgcccggcacctgaactgcttggtggtcccagcgtgttcctgttcccgccgaagcctaaagatactctaatgatcagccgtacgccagaggtgacatgtgtcgtggttgacgtgtcccacgaagatcccgaagttaagttcaattggtatgttgatggtgtagaggtacacaatgctaagactaaacctcgcgaggagcagtacgcctcgacctatcgtgtcgtgagcgttctgaccgtccttcaccaagattggcttaacggcaaagaatataagtgcaaggtaagcaataaagcacttccggccccaatcgagaaaaccatttccaaggccaaaggtcaaccaagagaaccccaggtgtatactcttccgccttctcgtgaggaaatgactaaaaatcaagtatcccttacgtgtctggttaaaggtttttatcctagcgatattgctgttgaatgggaatcgaacggtcagccggagaataattataaaacaacgccacccgtcctggatagcgacggctcattttttctgtatagcaaactgactgtagataaatcacggtggcagcagggcaatgtattcagttgctccgttatgcatgaagcgttacataatcactacacgcagaaatctcttagtctttcacccggt

SEQ ID NO: 1407 - DNA, 1341 bp, Synthetic construct
  source 1..1341: mol_type = other DNA
caggtgcagctggtgcaatctgggtctgacttgaagaagcctggggcctcagtgaaggtttcctgcaaggcttctggatacaccttcactagttatactatgaattgggtgcgacaggcccctggacaagggcttgagtggatgggatggatcaacaccaacactgggaccccaacgtatgcccagggcttcacaggacggtttgtcttctccttggacacctctgtcagcacggcatatctgcagatcagcagcctaaaggctgaggacactgccgtgtattactgtacgaggtatactgggaactactcctttgactactggggccagggaaccctggtcaccgtctcctcagctagcactaaagggccttctgtatttcccttggccccgtccagcaaatcgacctcgggagggacagccgccctgggttgccttgtgaaagattatttccctgagccagttaccgtaagttggaacagtggggcgctgacaagtggtgtgcacacgtttcctgccgtcctgcaatcatcgggcttgtatagcctcagctctgtggtcactgtcccaagttcatcgctgggcactcagacgtatatttgcaatgtgaaccacaaaccttcaaatacaaaagtggataaacgcgtagaaccgaaatcgtgtgataaaactcacacatgcccgccatgcccggcacctgaactgcttggtggtcccagcgtgttcctgttcccgccgaagcctaaagatactctaatgatcagccgtacgccagaggtgacatgtgtcgtggttgacgtgtcccacgaagatcccgaagttaagttcaattggtatgttgatggtgtagaggtacacaatgctaagactaaacctcgcgaggagcagtacgcctcgacctatcgtgtcgtgagcgttctgaccgtccttcaccaagattggcttaacggcaaagaatataagtgcaaggtaagcaataaagcacttccggccccaatcgagaaaaccatttccaaggccaaaggtcaaccaagagaaccccaggtgtatactcttccgccttctcgtgaggaaatgactaaaaatcaagtatcccttacgtgtctggttaaaggtttttatcctagcgatattgctgttgaatgggaatcgaacggtcagccggagaataattataaaacaacgccacccgtcctggatagcgacggctcattttttctgtatagcaaactgactgtagataaatcacggtggcagcagggcaatgtattcagttgctccgttatgcatgaagcgttacataatcactacacgcagaaatctcttagtctttcacccggt

SEQ ID NO: 1408 - DNA, 1362 bp, Synthetic construct
  source 1..1362: mol_type = other DNA
gaggtgcagctggtggagtctgggggagtcttggtacagcctggggggtccctgagactctcctgtgcagcctctggattcacctttaggagctatgccatgagctgggtccgccaggctccagggaaggggctggagtgggtctcagctattagtggtagtggtgatagcacatacttcgcagactccgtgaagggccggttcaccatctccagagacaattccaagaacacgctgtctctgcaaatgaacagcctgagagccgaggacacggccgtatattactgtgcgagcatcctaggatattgtagtggtaccagctgctatggcctctttgacaactggggccagggaaccctggtcaccgtctcctcagctagcactaaagggccttctgtatttcccttggccccgtccagcaaatcgacctcgggagggacagccgccctgggttgccttgtgaaagattatttccctgagccagttaccgtaagttggaacagtggggcgctgacaagtggtgtgcacacgtttcctgccgtcctgcaatcatcgggcttgtatagcctcagctctgtggtcactgtcccaagttcatcgctgggcactcagacgtatatttgcaatgtgaaccacaaaccttcaaatacaaaagtggataaacgcgtagaaccgaaatcgtgtgataaaactcacacatgcccgccatgcccggcacctgaactgcttggtggtcccagcgtgttcctgttcccgccgaagcctaaagatactctaatgatcagccgtacgccagaggtgacatgtgtcgtggttgacgtgtcccacgaagatcccgaagttaagttcaattggtatgttgatggtgtagaggtacacaatgctaagactaaacctcgcgaggagcagtacgcctcgacctatcgtgtcgtgagcgttctgaccgtccttcaccaagattggcttaacggcaaagaatataagtgcaaggtaagcaataaagcacttccggccccaatcgagaaaaccatttccaaggccaaaggtcaaccaagagaaccccaggtgtatactcttccgccttctcgtgaggaaatgactaaaaatcaagtatcccttacgtgtctggttaaaggtttttatcctagcgatattgctgttgaatgggaatcgaacggtcagccggagaataattataaaacaacgccacccgtcctggatagcgacggctcattttttctgtatagcaaactgactgtagataaatcacggtggcagcagggcaatgtattcagttgctccgttatgcatgaagcgttacataatcactacacgcagaaatctcttagtctttcacccggt

SEQ ID NO: 1409 - DNA, 1338 bp, Synthetic construct
  source 1..1338: mol_type = other DNA
caggtgcagctgcaggagtcgggcccaggactggtgaagccttcggggaccctgtccctcacctgcgctgtctctggtggctccatcagtaatgataactggtggagttgggtccgccagtcccccgggaaggggctggagtggattgggaaaatctatcatagtgagttcaccaactacaacccgtccctcaggagtcgagtcaccatatcagtagacaagtccaagaaccagttctccctggagctgacctctgtgaccgccgcggacacggccgtgtattactgtgcgagagagtatcagaactacatggacgtctggggcaaagggaccacggtcaccgtctcctcagctagcactaaagggccttctgtatttcccttggccccgtccagcaaatcgacctcgggagggacagccgccctgggttgccttgtgaaagattatttccctgagccagttaccgtaagttggaacagtggggcgctgacaagtggtgtgcacacgtttcctgccgtcctgcaatcatcgggcttgtatagcctcagctctgtggtcactgtcccaagttcatcgctgggcactcagacgtatatttgcaatgtgaaccacaaaccttcaaatacaaaagtggataaacgcgtagaaccgaaatcgtgtgataaaactcacacatgcccgccatgcccggcacctgaactgcttggtggtcccagcgtgttcctgttcccgccgaagcctaaagatactctaatgatcagccgtacgccagaggtgacatgtgtcgtggttgacgtgtcccacgaagatcccgaagttaagttcaattggtatgttgatggtgtagaggtacacaatgctaagactaaacctcgcgaggagcagtacgcctcgacctatcgtgtcgtgagcgttctgaccgtccttcaccaagattggcttaacggcaaagaatataagtgcaaggtaagcaataaagcacttccggccccaatcgagaaaaccatttccaaggccaaaggtcaaccaagagaaccccaggtgtatactcttccgccttctcgtgaggaaatgactaaaaatcaagtatcccttacgtgtctggttaaaggtttttatcctagcgatattgctgttgaatgggaatcgaacggtcagccggagaataattataaaacaacgccacccgtcctggatagcgacggctcattttttctgtatagcaaactgactgtagataaatcacggtggcagcagggcaatgtattcagttgctccgttatgcatgaagcgttacataatcactacacgcagaaatctcttagtctttcacccggt

SEQ ID NO: 1410 - DNA, 1350 bp, Synthetic construct
  source 1..1350: mol_type = other DNA
caggtgcagctgcaggagtcgggcccaggactggtgaagccttcggggaccctgtccctcacctgcgttgtctctggtgactccatcagcagtaataactggtggagttgggtccgccagcccccagggaagggtctggagtggattggacaaatctatcatagtggaatcaccaactacaacccgtccctcaagagtcgagtcaccatatcagtagacaagtccaagaaccagttctccctggagctgacctctgtgaccgccgcggacgcggccgtgtattactgtgcgagggcccagtgggaactacgagcgggctggttcgacccctggggccagggaaccctggtcaccgtctcctcagctagcactaaagggccttctgtatttcccttggccccgtccagcaaatcgacctcgggagggacagccgccctgggttgccttgtgaaagattatttccctgagccagttaccgtaagttggaacagtggggcgctgacaagtggtgtgcacacgtttcctgccgtcctgcaatcatcgggcttgtatagcctcagctctgtggtcactgtcccaagttcatcgctgggcactcagacgtatatttgcaatgtgaaccacaaaccttcaaatacaaaagtggataaacgcgtagaaccgaaatcgtgtgataaaactcacacatgcccgccatgcccggcacctgaactgcttggtggtcccagcgtgttcctgttcccgccgaagcctaaagatactctaatgatcagccgtacgccagaggtgacatgtgtcgtggttgacgtgtcccacgaagatcccgaagttaagttcaattggtatgttgatggtgtagaggtacacaatgctaagactaaacctcgcgaggagcagtacgcctcgacctatcgtgtcgtgagcgttctgaccgtccttcaccaagattggcttaacggcaaagaatataagtgcaaggtaagcaataaagcacttccggccccaatcgagaaaaccatttccaaggccaaaggtcaaccaagagaaccccaggtgtatactcttccgccttctcgtgaggaaatgactaaaaatcaagtatcccttacgtgtctggttaaaggtttttatcctagcgatattgctgttgaatgggaatcgaacggtcagccggagaataattataaaacaacgccacccgtcctggatagcgacggctcattttttctgtatagcaaactgactgtagataaatcacggtggcagcagggcaatgtattcagttgctccgttatgcatgaagcgttacataatcactacacgcagaaatctcttagtctttcacccggt

SEQ ID NO: 1411 - DNA, 1344 bp, Synthetic construct
  source 1..1344: mol_type = other DNA
gaggtgcagctggtggagtctgggggaggcttggtaaagcctggggggacccttacactctcctgtgcagcctctggattcactttcagtaacgcctggatgagctgggtccgccaggctccagggaaggggctggagtgggttggccgtattaaaagcaaaactgatggcgggacaacagactacgctgcacccgtgaaaggcagattcaccatctcaagagatgattcaaaaaacacgctgtatctgcaaatgaacagcctgaaaaccgaggacacagccgtgtattactgtaccccccggtacaactcggactttgactactggggccaaggaaccctggtcaccgtctcttcagctagcactaaagggccttctgtatttcccttggccccgtccagcaaatcgacctcgggagggacagccgccctgggttgccttgtgaaagattatttccctgagccagttaccgtaagttggaacagtggggcgctgacaagtggtgtgcacacgtttcctgccgtcctgcaatcatcgggcttgtatagcctcagctctgtggtcactgtcccaagttcatcgctgggcactcagacgtatatttgcaatgtgaaccacaaaccttcaaatacaaaagtggataaacgcgtagaaccgaaatcgtgtgataaaactcacacatgcccgccatgcccggcacctgaactgcttggtggtcccagcgtgttcctgttcccgccgaagcctaaagatactctaatgatcagccgtacgccagaggtgacatgtgtcgtggttgacgtgtcccacgaagatcccgaagttaagttcaattggtatgttgatggtgtagaggtacacaatgctaagactaaacctcgcgaggagcagtacgcctcgacctatcgtgtcgtgagcgttctgaccgtccttcaccaagattggcttaacggcaaagaatataagtgcaaggtaagcaataaagcacttccggccccaatcgagaaaaccatttccaaggccaaaggtcaaccaagagaaccccaggtgtatactcttccgccttctcgtgaggaaatgactaaaaatcaagtatcccttacgtgtctggttaaaggtttttatcctagcgatattgctgttgaatgggaatcgaacggtcagccggagaataattataaaacaacgccacccgtcctggatagcgacggctcattttttctgtatagcaaactgactgtagataaatcacggtggcagcagggcaatgtattcagttgctccgttatgcatgaagcgttacataatcactacacgcagaaatctcttagtctttcacccggt

SEQ ID NO: 1412 - DNA, 1347 bp, Synthetic construct
  source 1..1347: mol_type = other DNA
caggtgcagctgcaggagtcgggcccaggactggtgaagccttcggagaccctgtccctcacctgcactgtctctggtggctccatcagtagttactactggagctggatccggcagcccccagggaagggactggagtggattgggtatatctattacagtgggttcaccaagtacaacccctccctcaagagtcgagtcaccatatcagtagacacgtccaagaaccagttctccctgaagctgagctctgtgaccgctgcggacacggccgtgtattactgtgcgacccaccctcgtggatacaactatggtccctttgactactggggccagggaaccctggtcactgtctcctcagctagcactaaagggccttctgtatttcccttggccccgtccagcaaatcgacctcgggagggacagccgccctgggttgccttgtgaaagattatttccctgagccagttaccgtaagttggaacagtggggcgctgacaagtggtgtgcacacgtttcctgccgtcctgcaatcatcgggcttgtatagcctcagctctgtggtcactgtcccaagttcatcgctgggcactcagacgtatatttgcaatgtgaaccacaaaccttcaaatacaaaagtggataaacgcgtagaaccgaaatcgtgtgataaaactcacacatgcccgccatgcccggcacctgaactgcttggtggtcccagcgtgttcctgttcccgccgaagcctaaagatactctaatgatcagccgtacgccagaggtgacatgtgtcgtggttgacgtgtcccacgaagatcccgaagttaagttcaattggtatgttgatggtgtagaggtacacaatgctaagactaaacctcgcgaggagcagtacgcctcgacctatcgtgtcgtgagcgttctgaccgtccttcaccaagattggcttaacggcaaagaatataagtgcaaggtaagcaataaagcacttccggccccaatcgagaaaaccatttccaaggccaaaggtcaaccaagagaaccccaggtgtatactcttccgccttctcgtgaggaaatgactaaaaatcaagtatcccttacgtgtctggttaaaggtttttatcctagcgatattgctgttgaatgggaatcgaacggtcagccggagaataattataaaacaacgccacccgtcctggatagcgacggctcattttttctgtatagcaaactgactgtagataaatcacggtggcagcagggcaatgtattcagttgctccgttatgcatgaagcgttacataatcactacacgcagaaatctcttagtctttcacccggt

SEQ ID NO: 1413 - DNA, 1350 bp, Synthetic construct
  source 1..1350: mol_type = other DNA
caggtgcagctgcaggagtcgggcccaggactggtgaagccttcggagaccctgtccctcacctgcactgtctctggtggctccgtcaacagtggtcgttactactggagctggatccggcagcccccagggaagggactggagtggattgggtatatctattccagtgggtacaccaactacaacccctccctcaagagtcgagtcaccatgttactagacacgtccaagaaccagttctccctgaagctgaactccgtgaccgctgcggacacggccgtgtattactgtgcgaggtcacgtggataccgctatggtccctttgactactggggccagggaaccctggtcaccgtctcctcagctagcactaaagggccttctgtatttcccttggccccgtccagcaaatcgacctcgggagggacagccgccctgggttgccttgtgaaagattatttccctgagccagttaccgtaagttggaacagtggggcgctgacaagtggtgtgcacacgtttcctgccgtcctgcaatcatcgggcttgtatagcctcagctctgtggtcactgtcccaagttcatcgctgggcactcagacgtatatttgcaatgtgaaccacaaaccttcaaatacaaaagtggataaacgcgtagaaccgaaatcgtgtgataaaactcacacatgcccgccatgcccggcacctgaactgcttggtggtcccagcgtgttcctgttcccgccgaagcctaaagatactctaatgatcagccgtacgccagaggtgacatgtgtcgtggttgacgtgtcccacgaagatcccgaagttaagttcaattggtatgttgatggtgtagaggtacacaatgctaagactaaacctcgcgaggagcagtacgcctcgacctatcgtgtcgtgagcgttctgaccgtccttcaccaagattggcttaacggcaaagaatataagtgcaaggtaagcaataaagcacttccggccccaatcgagaaaaccatttccaaggccaaaggtcaaccaagagaaccccaggtgtatactcttccgccttctcgtgaggaaatgactaaaaatcaagtatcccttacgtgtctggttaaaggtttttatcctagcgatattgctgttgaatgggaatcgaacggtcagccggagaataattataaaacaacgccacccgtcctggatagcgacggctcattttttctgtatagcaaactgactgtagataaatcacggtggcagcagggcaatgtattcagttgctccgttatgcatgaagcgttacataatcactacacgcagaaatctcttagtctttcacccggt

SEQ ID NO: 1414 - DNA, 1335 bp, Synthetic construct
  source 1..1335: mol_type = other DNA
caggtgcagctggtgcaatctgggtctgagttgaagaagcctggggcctcagtgaaggtttcctgcgaggcttctggatacaccttcactagctatgctatgaattgggtgcgacaggcccctggacaagggcttgagtggatgggatggatcaacaccaacactgggaccccaacttatgcccagggcttcacaggacggtttgtcttctccttggacacctctgtcagcacggcatatctgcagatcagcagcctaaaggctgaggacactgccgtgtattactgtgcgagtcatagcacctcgtttgactactggggccaggggaccctggtcaccgtctcctcagctagcactaaagggccttctgtatttcccttggccccgtccagcaaatcgacctcgggagggacagccgccctgggttgccttgtgaaagattatttccctgagccagttaccgtaagttggaacagtggggcgctgacaagtggtgtgcacacgtttcctgccgtcctgcaatcatcgggcttgtatagcctcagctctgtggtcactgtcccaagttcatcgctgggcactcagacgtatatttgcaatgtgaaccacaaaccttcaaatacaaaagtggataaacgcgtagaaccgaaatcgtgtgataaaactcacacatgcccgccatgcccggcacctgaactgcttggtggtcccagcgtgttcctgttcccgccgaagcctaaagatactctaatgatcagccgtacgccagaggtgacatgtgtcgtggttgacgtgtcccacgaagatcccgaagttaagttcaattggtatgttgatggtgtagaggtacacaatgctaagactaaacctcgcgaggagcagtacgcctcgacctatcgtgtcgtgagcgttctgaccgtccttcaccaagattggcttaacggcaaagaatataagtgcaaggtaagcaataaagcacttccggccccaatcgagaaaaccatttccaaggccaaaggtcaaccaagagaaccccaggtgtatactcttccgccttctcgtgaggaaatgactaaaaatcaagtatcccttacgtgtctggttaaaggtttttatcctagcgatattgctgttgaatgggaatcgaacggtcagccggagaataattataaaacaacgccacccgtcctggatagcgacggctcattttttctgtatagcaaactgactgtagataaatcacggtggcagcagggcaatgtattcagttgctccgttatgcatgaagcgttacataatcactacacgcagaaatctcttagtctttcacccggt

SEQ ID NO: 1415 - DNA, 1344 bp, Synthetic construct
  source 1..1344: mol_type = other DNA
caggtgcagctacagcagtggggcgcaggactggtgaagccttcggagaccctgtccctcacctgcgctgtccatggtgggtccttcagtgattactacttgacctggattcgccagcccccagggaaggggctggagtggattggggaaatcaatcatagtggaagcaccaactacaacccctccctcaagagtcgagtcaccttatcaatagacacgtccaagaaccagttctccctgaagctgagctctgtgaccgccgcggacacggctgtgtattactgtgcgagaggtagtgaagactactactattacatggacgtctggggcaaagggaccacggtcaccgtctcctcagctagcactaaagggccttctgtatttcccttggccccgtccagcaaatcgacctcgggagggacagccgccctgggttgccttgtgaaagattatttccctgagccagttaccgtaagttggaacagtggggcgctgacaagtggtgtgcacacgtttcctgccgtcctgcaatcatcgggcttgtatagcctcagctctgtggtcactgtcccaagttcatcgctgggcactcagacgtatatttgcaatgtgaaccacaaaccttcaaatacaaaagtggataaacgcgtagaaccgaaatcgtgtgataaaactcacacatgcccgccatgcccggcacctgaactgcttggtggtcccagcgtgttcctgttcccgccgaagcctaaagatactctaatgatcagccgtacgccagaggtgacatgtgtcgtggttgacgtgtcccacgaagatcccgaagttaagttcaattggtatgttgatggtgtagaggtacacaatgctaagactaaacctcgcgaggagcagtacgcctcgacctatcgtgtcgtgagcgttctgaccgtccttcaccaagattggcttaacggcaaagaatataagtgcaaggtaagcaataaagcacttccggccccaatcgagaaaaccatttccaaggccaaaggtcaaccaagagaaccccaggtgtatactcttccgccttctcgtgaggaaatgactaaaaatcaagtatcccttacgtgtctggttaaaggtttttatcctagcgatattgctgttgaatgggaatcgaacggtcagccggagaataattataaaacaacgccacccgtcctggatagcgacggctcattttttctgtatagcaaactgactgtagataaatcacggtggcagcagggcaatgtattcagttgctccgttatgcatgaagcgttacataatcactacacgcagaaatctcttagtctttcacccggt

SEQ ID NO: 1416 - DNA, 1350 bp, Synthetic construct
  source 1..1350: mol_type = other DNA
gaggtgcagctggtgcagtctggagcagaggtgaaaaagcccggggagtctctgaagatctcctgtaagggttctggatacatctttaccagctactggatcggctgggtgcgccagatgcccgggaaaggcctggagtggatggggatcatctatcctggtgactctgataccagatacagcccgtctttccaaggccaggtcaccatctcagccgacaagtccatcatcaccgcctacctgcagtggagcagcctgaaggcctcggacaccgccatgtattactgtgcgagacacgactactttgatattggaggttattttgactactggggccagggaaccctggtcaccgtctcctcagctagcactaaagggccttctgtatttcccttggccccgtccagcaaatcgacctcgggagggacagccgccctgggttgccttgtgaaagattatttccctgagccagttaccgtaagttggaacagtggggcgctgacaagtggtgtgcacacgtttcctgccgtcctgcaatcatcgggcttgtatagcctcagctctgtggtcactgtcccaagttcatcgctgggcactcagacgtatatttgcaatgtgaaccacaaaccttcaaatacaaaagtggataaacgcgtagaaccgaaatcgtgtgataaaactcacacatgcccgccatgcccggcacctgaactgcttggtggtcccagcgtgttcctgttcccgccgaagcctaaagatactctaatgatcagccgtacgccagaggtgacatgtgtcgtggttgacgtgtcccacgaagatcccgaagttaagttcaattggtatgttgatggtgtagaggtacacaatgctaagactaaacctcgcgaggagcagtacgcctcgacctatcgtgtcgtgagcgttctgaccgtccttcaccaagattggcttaacggcaaagaatataagtgcaaggtaagcaataaagcacttccggccccaatcgagaaaaccatttccaaggccaaaggtcaaccaagagaaccccaggtgtatactcttccgccttctcgtgaggaaatgactaaaaatcaagtatcccttacgtgtctggttaaaggtttttatcctagcgatattgctgttgaatgggaatcgaacggtcagccggagaataattataaaacaacgccacccgtcctggatagcgacggctcattttttctgtatagcaaactgactgtagataaatcacggtggcagcagggcaatgtattcagttgctccgttatgcatgaagcgttacataatcactacacgcagaaatctcttagtctttcacccggt

SEQ ID NO: 1417 - DNA, 1338 bp, Synthetic construct
  source 1..1338: mol_type = other DNA
caggtgcagctggtgcagtctggggctgaggtgaagaagcctggggcctcagtgaaggtctcctgcaaggctgatggatacaccttcaccgactactatatgcactgggtgcgacaggcccctggacaagggcatgagtggatgggatggatcaaccctaacagtggtgtcacatactatgcacagaagtttcagggcagggtcaccatgaccagggacacgtccatcagcacagcctacatggagctgaacagacttagatctgacgacacggccgtgtattactgtgcgagagatcggaccttctactttgactactggggccagggaaccctggtcactgtctcctcagctagcactaaagggccttctgtatttcccttggccccgtccagcaaatcgacctcgggagggacagccgccctgggttgccttgtgaaagattatttccctgagccagttaccgtaagttggaacagtggggcgctgacaagtggtgtgcacacgtttcctgccgtcctgcaatcatcgggcttgtatagcctcagctctgtggtcactgtcccaagttcatcgctgggcactcagacgtatatttgcaatgtgaaccacaaaccttcaaatacaaaagtggataaacgcgtagaaccgaaatcgtgtgataaaactcacacatgcccgccatgcccggcacctgaactgcttggtggtcccagcgtgttcctgttcccgccgaagcctaaagatactctaatgatcagccgtacgccagaggtgacatgtgtcgtggttgacgtgtcccacgaagatcccgaagttaagttcaattggtatgttgatggtgtagaggtacacaatgctaagactaaacctcgcgaggagcagtacgcctcgacctatcgtgtcgtgagcgttctgaccgtccttcaccaagattggcttaacggcaaagaatataagtgcaaggtaagcaataaagcacttccggccccaatcgagaaaaccatttccaaggccaaaggtcaaccaagagaaccccaggtgtatactcttccgccttctcgtgaggaaatgactaaaaatcaagtatcccttacgtgtctggttaaaggtttttatcctagcgatattgctgttgaatgggaatcgaacggtcagccggagaataattataaaacaacgccacccgtcctggatagcgacggctcattttttctgtatagcaaactgactgtagataaatcacggtggcagcagggcaatgtattcagttgctccgttatgcatgaagcgttacataatcactacacgcagaaatctcttagtctttcacccggt

SEQ ID NO: 1418 - DNA, 1365 bp, Synthetic construct
  source 1..1365: mol_type = other DNA
caggtgcagctggtgcagtctggggctgaggtgaagaagcctggggcctcagtgaaggtctcctgcaaggcttctggatacaccttcaccgactactatatgcactgggtgcgacaggcccctggacaagggcttgagtggatgggatggatcaaccctaacaatggtggcacagactatgcacagaagtttcagggcagggtcaccatgaccagggacacgtccatcagcacagcctacatggagttacacaggctaagatctgacgacacggccgtgtatttctgtgcgagaggggtctatgatgtagtagttccaactgctatcgtcaactggttcgacccctggggccagggaaccctggtcaccgtctcctcagctagcactaaagggccttctgtatttcccttggccccgtccagcaaatcgacctcgggagggacagccgccctgggttgccttgtgaaagattatttccctgagccagttaccgtaagttggaacagtggggcgctgacaagtggtgtgcacacgtttcctgccgtcctgcaatcatcgggcttgtatagcctcagctctgtggtcactgtcccaagttcatcgctgggcactcagacgtatatttgcaatgtgaaccacaaaccttcaaatacaaaagtggataaacgcgtagaaccgaaatcgtgtgataaaactcacacatgcccgccatgcccggcacctgaactgcttggtggtcccagcgtgttcctgttcccgccgaagcctaaagatactctaatgatcagccgtacgccagaggtgacatgtgtcgtggttgacgtgtcccacgaagatcccgaagttaagttcaattggtatgttgatggtgtagaggtacacaatgctaagactaaacctcgcgaggagcagtacgcctcgacctatcgtgtcgtgagcgttctgaccgtccttcaccaagattggcttaacggcaaagaatataagtgcaaggtaagcaataaagcacttccggccccaatcgagaaaaccatttccaaggccaaaggtcaaccaagagaaccccaggtgtatactcttccgccttctcgtgaggaaatgactaaaaatcaagtatcccttacgtgtctggttaaaggtttttatcctagcgatattgctgttgaatgggaatcgaacggtcagccggagaataattataaaacaacgccacccgtcctggatagcgacggctcattttttctgtatagcaaactgactgtagataaatcacggtggcagcagggcaatgtattcagttgctccgttatgcatgaagcgttacataatcactacacgcagaaatctcttagtctttcacccggt

SEQ ID NO: 1419 - DNA, 1347 bp, Synthetic construct
  source 1..1347: mol_type = other DNA
caggtgcagctgcaggagtcgggcccaggactggtgaagccttcggggaccctgtccctcacctgcgctgtctctggtgactccatcagcaatgattactggtggaattgggtccgccagcccccagggaagggtctggagtggattggagaaatctatcatagtgggcacaccaactacaacccgtccctcaagagtcgagtcaccatatcagtagacaagtccaagaaccagttgtccctgaagctgacctctgtgaacgccgcggacacggccgtgtattactgtgcgagaggtggaactgaaattacggggtacatggacgtctggggcaaagggaccacggtcaccgtctcctcagctagcactaaagggccttctgtatttcccttggccccgtccagcaaatcgacctcgggagggacagccgccctgggttgccttgtgaaagattatttccctgagccagttaccgtaagttggaacagtggggcgctgacaagtggtgtgcacacgtttcctgccgtcctgcaatcatcgggcttgtatagcctcagctctgtggtcactgtcccaagttcatcgctgggcactcagacgtatatttgcaatgtgaaccacaaaccttcaaatacaaaagtggataaacgcgtagaaccgaaatcgtgtgataaaactcacacatgcccgccatgcccggcacctgaactgcttggtggtcccagcgtgttcctgttcccgccgaagcctaaagatactctaatgatcagccgtacgccagaggtgacatgtgtcgtggttgacgtgtcccacgaagatcccgaagttaagttcaattggtatgttgatggtgtagaggtacacaatgctaagactaaacctcgcgaggagcagtacgcctcgacctatcgtgtcgtgagcgttctgaccgtccttcaccaagattggcttaacggcaaagaatataagtgcaaggtaagcaataaagcacttccggccccaatcgagaaaaccatttccaaggccaaaggtcaaccaagagaaccccaggtgtatactcttccgccttctcgtgaggaaatgactaaaaatcaagtatcccttacgtgtctggttaaaggtttttatcctagcgatattgctgttgaatgggaatcgaacggtcagccggagaataattataaaacaacgccacccgtcctggatagcgacggctcattttttctgtatagcaaactgactgtagataaatcacggtggcagcagggcaatgtattcagttgctccgttatgcatgaagcgttacataatcactacacgcagaaatctcttagtctttcacccggt

SEQ ID NO: 1420 - DNA, 1350 bp, Synthetic construct
  source 1..1350: mol_type = other DNA
caggtgcagctgcaggagtcgggcccaggactggtgaagccttcggggaccctgtccctcacctgcgctgtctctggtgcctccatcagaagtggtcactggtggagttgggtccgccagcccccagggaagggactggagtggattggggaaatctatcatagtgggaacaccaactacaacccgtccctcaagagtcgagtcaccctatcagtagacaagtccaagaaccagttctccctgaagctgagctctgtgaccgccgcggacacggccgtgtattactgtgcgagaggtcactacggtgactacgtcgtctactttgactactggggccagggaaccctggtcactgtctcctcagctagcactaaagggccttctgtatttcccttggccccgtccagcaaatcgacctcgggagggacagccgccctgggttgccttgtgaaagattatttccctgagccagttaccgtaagttggaacagtggggcgctgacaagtggtgtgcacacgtttcctgccgtcctgcaatcatcgggcttgtatagcctcagctctgtggtcactgtcccaagttcatcgctgggcactcagacgtatatttgcaatgtgaaccacaaaccttcaaatacaaaagtggataaacgcgtagaaccgaaatcgtgtgataaaactcacacatgcccgccatgcccggcacctgaactgcttggtggtcccagcgtgttcctgttcccgccgaagcctaaagatactctaatgatcagccgtacgccagaggtgacatgtgtcgtggttgacgtgtcccacgaagatcccgaagttaagttcaattggtatgttgatggtgtagaggtacacaatgctaagactaaacctcgcgaggagcagtacgcctcgacctatcgtgtcgtgagcgttctgaccgtccttcaccaagattggcttaacggcaaagaatataagtgcaaggtaagcaataaagcacttccggccccaatcgagaaaaccatttccaaggccaaaggtcaaccaagagaaccccaggtgtatactcttccgccttctcgtgaggaaatgactaaaaatcaagtatcccttacgtgtctggttaaaggtttttatcctagcgatattgctgttgaatgggaatcgaacggtcagccggagaataattataaaacaacgccacccgtcctggatagcgacggctcattttttctgtatagcaaactgactgtagataaatcacggtggcagcagggcaatgtattcagttgctccgttatgcatgaagcgttacataatcactacacgcagaaatctcttagtctttcacccggt

SEQ ID NO: 1421 - DNA, 1347 bp, Synthetic construct
  source 1..1347: mol_type = other DNA
caggtgcagctgcaggagtcgggcccaggactggtgaagccttcggagaccctgtccctcacctgcactgtctctggtggctccatcagtagttactattggagctggatccggcagcccccagggaagggactggaatggattggttatgtctattacagtgggtacaccaagtacaatccctccctcaagagtcgagtcaccatatcaatagacgcgtccaagaaccagttctccctgaagctgacctctgtgaccgctgcggacacggccgtgtattactgtgcgaccgtcgaatcaaagtggaactacgggccttttgctatctggggacaagggacaatggtcaccgtctcttcagctagcactaaagggccttctgtatttcccttggccccgtccagcaaatcgacctcgggagggacagccgccctgggttgccttgtgaaagattatttccctgagccagttaccgtaagttggaacagtggggcgctgacaagtggtgtgcacacgtttcctgccgtcctgcaatcatcgggcttgtatagcctcagctctgtggtcactgtcccaagttcatcgctgggcactcagacgtatatttgcaatgtgaaccacaaaccttcaaatacaaaagtggataaacgcgtagaaccgaaatcgtgtgataaaactcacacatgcccgccatgcccggcacctgaactgcttggtggtcccagcgtgttcctgttcccgccgaagcctaaagatactctaatgatcagccgtacgccagaggtgacatgtgtcgtggttgacgtgtcccacgaagatcccgaagttaagttcaattggtatgttgatggtgtagaggtacacaatgctaagactaaacctcgcgaggagcagtacgcctcgacctatcgtgtcgtgagcgttctgaccgtccttcaccaagattggcttaacggcaaagaatataagtgcaaggtaagcaataaagcacttccggccccaatcgagaaaaccatttccaaggccaaaggtcaaccaagagaaccccaggtgtatactcttccgccttctcgtgaggaaatgactaaaaatcaagtatcccttacgtgtctggttaaaggtttttatcctagcgatattgctgttgaatgggaatcgaacggtcagccggagaataattataaaacaacgccacccgtcctggatagcgacggctcattttttctgtatagcaaactgactgtagataaatcacggtggcagcagggcaatgtattcagttgctccgttatgcatgaagcgttacataatcactacacgcagaaatctcttagtctttcacccggt

SEQ ID NO: 1422 - DNA, 1356 bp, Synthetic construct
  source 1..1356: mol_type = other DNA
caggtgcagctggtgcagtctggggctgaggtgaagaagcctggggcctcagtgaaggtctcctgcaaggcttctggatacaccttcaccggctactatatgaactgggtgcgacaggcccctggacaagggcttgagtggatgggatggatcaaccctaacagtggtgccacaaactatgcacagaagtttcagggcagggtcaccatgaccagggacacgtccatcagcacagactacatggaactgagcaggctgagatctgacgacacggccgtttattactgtgcgagagatggggctaagtggaatcacgagggttactactttgactactggggccagggaaccctggtcaccgtctcctcagctagcactaaagggccttctgtatttcccttggccccgtccagcaaatcgacctcgggagggacagccgccctgggttgccttgtgaaagattatttccctgagccagttaccgtaagttggaacagtggggcgctgacaagtggtgtgcacacgtttcctgccgtcctgcaatcatcgggcttgtatagcctcagctctgtggtcactgtcccaagttcatcgctgggcactcagacgtatatttgcaatgtgaaccacaaaccttcaaatacaaaagtggataaacgcgtagaaccgaaatcgtgtgataaaactcacacatgcccgccatgcccggcacctgaactgcttggtggtcccagcgtgttcctgttcccgccgaagcctaaagatactctaatgatcagccgtacgccagaggtgacatgtgtcgtggttgacgtgtcccacgaagatcccgaagttaagttcaattggtatgttgatggtgtagaggtacacaatgctaagactaaacctcgcgaggagcagtacgcctcgacctatcgtgtcgtgagcgttctgaccgtccttcaccaagattggcttaacggcaaagaatataagtgcaaggtaagcaataaagcacttccggccccaatcgagaaaaccatttccaaggccaaaggtcaaccaagagaaccccaggtgtatactcttccgccttctcgtgaggaaatgactaaaaatcaagtatcccttacgtgtctggttaaaggtttttatcctagcgatattgctgttgaatgggaatcgaacggtcagccggagaataattataaaacaacgccacccgtcctggatagcgacggctcattttttctgtatagcaaactgactgtagataaatcacggtggcagcagggcaatgtattcagttgctccgttatgcatgaagcgttacataatcactacacgcagaaatctcttagtctttcacccggt

SEQ ID NO: 1423 - protein, 451 aa, Synthetic construct
QVQLQESGPGLVKPSGTLSLTCAVSGGSISINNWWSWVRQPPGKGLEWLGKIYHSGNTDYNPSLKSRVTISVDKSKNQFSLRLSSVTAADTAVYYCASGSDYDFWSGYLDYWGQGTLVTVSSASTKGPSVFPLAPSSKSTSGGTAALGCLVKDYFPEPVTVSWNSGALTSGVHTFPAVLQSSGLYSLSSVVTVPSSSLGTQTYICNVNHKPSNTKVDKRVEPKSCDKTHTCPPCPAPELLGGPSVFLFPPKPKDTLMISRTPEVTCVVVDVSHEDPEVKFNWYVDGVEVHNAKTKPREEQYASTYRVVSVLTVLHQDWLNGKEYKCKVSNKALPAPIEKTISKAKGQPREPQVYTLPPSREEMTKNQVSLTCLVKGFYPSDIAVEWESNGQPENNYKTTPPVLDSDGSFFLYSKLTVDKSRWQQGNVFSCSVMHEALHNHYTQKSLSLSPG

SEQ ID NO: 1424 - protein, 450 aa, Synthetic construct
EVQLVESGGGLVQPGRSLRLSCAASGFTFDDYAMHWVRQAPGKGLEWVSGISWNSGSIAYADSVKGRFTISRDNAKNSLYLQMNSLRVEDTAFFYCARVAAAAGIPFFDYWGQGTLVTVSSASTKGPSVFPLAPSSKSTSGGTAALGCLVKDYFPEPVTVSWNSGALTSGVHTFPAVLQSSGLYSLSSVVTVPSSSLGTQTYICNVNHKPSNTKVDKRVEPKSCDKTHTCPPCPAPELLGGPSVFLFPPKPKDTLMISRTPEVTCVVVDVSHEDPEVKFNWYVDGVEVHNAKTKPREEQYASTYRVVSVLTVLHQDWLNGKEYKCKVSNKALPAPIEKTISKAKGQPREPQVYTLPPSREEMTKNQVSLTCLVKGFYPSDIAVEWESNGQPENNYKTTPPVLDSDGSFFLYSKLTVDKSRWQQGNVFSCSVMHEALHNHYTQKSLSLSPG

SEQ ID NO: 1425 - protein, 450 aa, Synthetic construct
QVQLQESGPGLVKPSGTLTLTCAVSGGSINRDNWWSWVRQPPGKGLEWIGQIYQSGSTNYNPSLKSRVTISVDKSKNQFSLKLSSVTAADTAVYYCARVYDWNYGGHFDYWGQGTLVTVSSASTKGPSVFPLAPSSKSTSGGTAALGCLVKDYFPEPVTVSWNSGALTSGVHTFPAVLQSSGLYSLSSVVTVPSSSLGTQTYICNVNHKPSNTKVDKRVEPKSCDKTHTCPPCPAPELLGGPSVFLFPPKPKDTLMISRTPEVTCVVVDVSHEDPEVKFNWYVDGVEVHNAKTKPREEQYASTYRVVSVLTVLHQDWLNGKEYKCKVSNKALPAPIEKTISKAKGQPREPQVYTLPPSREEMTKNQVSLTCLVKGFYPSDIAVEWESNGQPENNYKTTPPVLDSDGSFFLYSKLTVDKSRWQQGNVFSCSVMHEALHNHYTQKSLSLSPG

SEQ ID NO: 1426 - protein, 449 aa, Synthetic construct
QVQLQESGPGLVKPSGTLSLTCAVSGDSISSNNWWSWVRQPPGKGLEWIGQIYHSGHTNYNPSLKSRVTISVDMSKNQFSLKLTSVTAADTAVYYCARGATEILGYFDLWGRGTLVTVSSASTKGPSVFPLAPSSKSTSGGTAALGCLVKDYFPEPVTVSWNSGALTSGVHTFPAVLQSSGLYSLSSVVTVPSSSLGTQTYICNVNHKPSNTKVDKRVEPKSCDKTHTCPPCPAPELLGGPSVFLFPPKPKDTLMISRTPEVTCVVVDVSHEDPEVKFNWYVDGVEVHNAKTKPREEQYASTYRVVSVLTVLHQDWLNGKEYKCKVSNKALPAPIEKTISKAKGQPREPQVYTLPPSREEMTKNQVSLTCLVKGFYPSDIAVEWESNGQPENNYKTTPPVLDSDGSFFLYSKLTVDKSRWQQGNVFSCSVMHEALHNHYTQKSLSLSPG

SEQ ID NO: 1427 - protein, 451 aa, Synthetic construct
QVQLQESGPGLVKPSETLSLTCTVSGGSVSSGSYYWSWIRQPPGKGLEWIGYIYKSGFTNYNPSLKSRVTISVDTSKNQFSLKLSSVTAADTAVYYCAIGGRGYSYGPFDYWGQGTLVTVSSASTKGPSVFPLAPSSKSTSGGTAALGCLVKDYFPEPVTVSWNSGALTSGVHTFPAVLQSSGLYSLSSVVTVPSSSLGTQTYICNVNHKPSNTKVDKRVEPKSCDKTHTCPPCPAPELLGGPSVFLFPPKPKDTLMISRTPEVTCVVVDVSHEDPEVKFNWYVDGVEVHNAKTKPREEQYASTYRVVSVLTVLHQDWLNGKEYKCKVSNKALPAPIEKTISKAKGQPREPQVYTLPPSREEMTKNQVSLTCLVKGFYPSDIAVEWESNGQPENNYKTTPPVLDSDGSFFLYSKLTVDKSRWQQGNVFSCSVMHEALHNHYTQKSLSLSPG

SEQ ID NO: 1428 - protein, 450 aa, Synthetic construct
QVQLVQSGAEVKKPGASVKVSCKASGYTFTGYYLHWVRQAPGQGLEWMGWINPNSGDTNYVQNFQGRVTMTRDTSISTAYMELSRLRSDDTAVYYCARSYVDTSSSAFDIWGQGTMVTVSSASTKGPSVFPLAPSSKSTSGGTAALGCLVKDYFPEPVTVSWNSGALTSGVHTFPAVLQSSGLYSLSSVVTVPSSSLGTQTYICNVNHKPSNTKVDKRVEPKSCDKTHTCPPCPAPELLGGPSVFLFPPKPKDTLMISRTPEVTCVVVDVSHEDPEVKFNWYVDGVEVHNAKTKPREEQYASTYRVVSVLTVLHQDWLNGKEYKCKVSNKALPAPIEKTISKAKGQPREPQVYTLPPSREEMTKNQVSLTCLVKGFYPSDIAVEWESNGQPENNYKTTPPVLDSDGSFFLYSKLTVDKSRWQQGNVFSCSVMHEALHNHYTQKSLSLSPG

SEQ ID NO: 1429 - protein, 449 aa, Synthetic construct
QVQLQESGPGLVKPSETLSLTCTVSGGSISSYYWSWIRQPPGKGLEWIGYVYYSGYTKYNPSLKSRVTISVDTPKTQFSLKMSSVTAADTAVYYCASVESKWNYGPFDIWGQGTMVTVSSASTKGPSVFPLAPSSKSTSGGTAALGCLVKDYFPEPVTVSWNSGALTSGVHTFPAVLQSSGLYSLSSVVTVPSSSLGTQTYICNVNHKPSNTKVDKRVEPKSCDKTHTCPPCPAPELLGGPSVFLFPPKPKDTLMISRTPEVTCVVVDVSHEDPEVKFNWYVDGVEVHNAKTKPREEQYASTYRVVSVLTVLHQDWLNGKEYKCKVSNKALPAPIEKTISKAKGQPREPQVYTLPPSREEMTKNQVSLTCLVKGFYPSDIAVEWESNGQPENNYKTTPPVLDSDGSFFLYSKLTVDKSRWQQGNVFSCSVMHEALHNHYTQKSLSLSPG

SEQ ID NO: 1430 - protein, 453 aa, Synthetic construct
QVQLQESGPGLVKPSETLSLTCTVSGDSISSYYWSWIRQPPGKGLEWIGYIYYSGFTKYNPSLNSRVTISVDTSKSQFSLKLTSVTAADTAVYYCAMREPRGRYNWNYGPFDIWGQGTMVTVSSASTKGPSVFPLAPSSKSTSGGTAALGCLVKDYFPEPVTVSWNSGALTSGVHTFPAVLQSSGLYSLSSVVTVPSSSLGTQTYICNVNHKPSNTKVDKRVEPKSCDKTHTCPPCPAPELLGGPSVFLFPPKPKDTLMISRTPEVTCVVVDVSHEDPEVKFNWYVDGVEVHNAKTKPREEQYASTYRVVSVLTVLHQDWLNGKEYKCKVSNKALPAPIEKTISKAKGQPREPQVYTLPPSREEMTKNQVSLTCLVKGFYPSDIAVEWESNGQPENNYKTTPPVLDSDGSFFLYSKLTVDKSRWQQGNVFSCSVMHEALHNHYTQKSLSLSPG

SEQ ID NO: 1431 - protein, 446 aa, Synthetic construct
QVQLQESGPGLVKPSGTLSLTCAVSGGSISNDNWWSWVRQPPGKGLEWIGKIYHSEFTNYNPSLKSRVTISVDKSKNQFSLELNSVTAADTAVYYCAREYHNFMDVWCKGTTVTVSSASTKGPSVFPLAPSSKSTSGGTAALGCLVKDYFPEPVTVSWNSGALTSGVHTFPAVLQSSGLYSLSSVVTVPSSSLGTQTYICNVNHKPSNTKVDKRVEPKSCDKTHTCPPCPAPELLGGPSVFLFPPKPKDTLMISRTPEVTCVVVDVSHEDPEVKFNWYVDGVEVHNAKTKPREEQYASTYRVVSVLTVLHQDWLNGKEYKCKVSNKALPAPIEKTISKAKGQPREPQVYTLPPSREEMTKNQVSLTCLVKGFYPSDIAVEWESNGQPENNYKTTPPVLDSDGSFFLYSKLTVDKSRWQQGNVFSCSVMHEALHNHYTQKSLSLSPG

SEQ ID NO: 1432 - protein, 451 aa, Synthetic construct
QVQLQESGPGLVKPSETLSLTCTVSGDSVSSGKYFWSWIRQSPGKGLEWIGYIYYSGSTNYNPSLKNRVTISVDTSKKELSLKLSSVTAADTAVYYCARGGHNWNYAAFDIWGQGTMVTVSSASTKGPSVFPLAPSSKSTSGGTAALGCLVKDYFPEPVTVSWNSGALTSGVHTFPAVLQSSGLYSLSSVVTVPSSSLGTQTYICNVNHKPSNTKVDKRVEPKSCDKTHTCPPCPAPELLGGPSVFLFPPKPKDTLMISRTPEVTCVVVDVSHEDPEVKFNWYVDGVEVHNAKTKPREEQYASTYRVVSVLTVLHQDWLNGKEYKCKVSNKALPAPIEKTISKAKGQPREPQVYTLPPSREEMTKNQVSLTCLVKGFYPSDIAVEWESNGQPENNYKTTPPVLDSDGSFFLYSKLTVDKSRWQQGNVFSCSVMHEALHNHYTQKSLSLSPG

SEQ ID NO: 1433 - protein, 446 aa, Synthetic construct
QVQLQESGPGLVKPSGTLSLTCAVSGGSISNDNWWSWVRQSPGKGLEWIGKIYHSEFTNYNPSLKSRVTISVDKSKNQFSLELSSVAAADTAVYYCAREYENFMDVWGKGTTVTVSSASTKGPSVFPLAPSSKSTSGGTAALGCLVKDYFPEPVTVSWNSGALTSGVHTFPAVLQSSGLYSLSSVVTVPSSSLGTQTYICNVNHKPSNTKVDKRVEPKSCDKTHTCPPCPAPELLGGPSVFLFPPKPKDTLMISRTPEVTCVVVDVSHEDPEVKFNWYVDGVEVHNAKTKPREEQYASTYRVVSVLTVLHQDWLNGKEYKCKVSNKALPAPIEKTISKAKGQPREPQVYTLPPSREEMTKNQVSLTCLVKGFYPSDIAVEWESNGQPENNYKTTPPVLDSDGSFFLYSKLTVDKSRWQQGNVFSCSVMHEALHNHYTQKSLSLSPG

SEQ ID NO: 1434 - protein, 451 aa, Synthetic construct
QVQLQESGPGLVKPSGTLSLTCAVSGDSISSNSWWNWVRQPPGKGLEWIGQIFHSGHTNYNPSLKSRVTMSIDKSKNQFSLKLTSVTAADTALYYCARGGEYENSANWFDPWGQGTLVTVSSASTKGPSVFPLAPSSKSTSGGTAALGCLVKDYFPEPVTVSWNSGALTSGVHTFPAVLQSSGLYSLSSVVTVPSSSLGTQTYICNVNHKPSNTKVDKRVEPKSCDKTHTCPPCPAPELLGGPSVFLFPPKPKDTLMISRTPEVTCVVVDVSHEDPEVKFNWYVDGVEVHNAKTKPREEQYASTYRVVSVLTVLHQDWLNGKEYKCKVSNKALPAPIEKTISKAKGQPREPQVYTLPPSREEMTKNQVSLTCLVKGFYPSDIAVEWESNGQPENNYKTTPPVLDSDGSFFLYSKLTVDKSRWQQGNVFSCSVMHEALHNHYTQKSLSLSPG

SEQ ID NO: 1435 - protein, 451 aa, Synthetic construct
QVQLQESGPGLVKPSGTLSLTCAVSGVSINKDNWWTWVRQPPGKGLEWIGKIYHSGSTNYNPSLKSRVTISVDNSKNQFSLKLNSVTAADTAVYYCTRGGDIAMEGDWFAPWGQGTLVTVSSASTKGPSVFPLAPSSKSTSGGTAALGCLVKDYFPEPVTVSWNSGALTSGVHTFPAVLQSSGLYSLSSVVTVPSSSLGTQTYICNVNHKPSNTKVDKRVEPKSCDKTHTCPPCPAPELLGGPSVFLFPPKPKDTLMISRTPEVTCVVVDVSHEDPEVKFNWYVDGVEVHNAKTKPREEQYASTYRVVSVLTVLHQDWLNGKEYKCKVSNKALPAPIEKTISKAKGQPREPQVYTLPPSREEMTKNQVSLTCLVKGFYPSDIAVEWESNGQPENNYKTTPPVLDSDGSFFLYSKLTVDKSRWQQGNVFSCSVMHEALHNHYTQKSLSLSPG

SEQ ID NO: 1436 - protein, 449 aa, Synthetic construct
QVQLQESGPGLVKPSGTLSLTCAVSGGSISSDNWWNWVRQPPGKGLEWLGKIYHSGNTDYNPSLKSRVTISVDKSKNQFSLRLSSVTAADTAVYYCARGGTETTGYMDVWGKGTTVTVSSASTKGPSVFPLAPSSKSTSGGTAALGCLVKDYFPEPVTVSWNSGALTSGVHTFPAVLQSSGLYSLSSVVTVPSSSLGTQTYICNVNHKPSNTKVDKRVEPKSCDKTHTCPPCPAPELLGGPSVFLFPPKPKDTLMISRTPEVTCVVVDVSHEDPEVKFNWYVDGVEVHNAKTKPREEQYASTYRVVSVLTVLHQDWLNGKEYKCKVSNKALPAPIEKTISKAKGQPREPQVYTLPPSREEMTKNQVSLTCLVKGFYPSDIAVEWESNGQPENNYKTTPPVLDSDGSFFLYSKLTVDKSRWQQGNVFSCSVMHEALHNHYTQKSLSLSPG

SEQ ID NO: 1437 - protein, 451 aa, Synthetic construct
QVQLQESGPGLVKPSGTLSLTCAVSGGSISNDNWWSWVRQPPGKGLEWIGKIYHSGFTNYNPSLKSRVTISVDKSKNQFSLKLNSVTAADTAVYYCARGGDNFMEGEGLGTWGPGTLVTVSSASTKGPSVFPLAPSSKSTSGGTAALGCLVKDYFPEPVTVSWNSGALTSGVHTFPAVLQSSGLYSLSSVVTVPSSSLGTQTYICNVNHKPSNTKVDKRVEPKSCDKTHTCPPCPAPELLGGPSVFLFPPKPKDTLMISRTPEVTCVVVDVSHEDPEVKFNWYVDGVEVHNAKTKPREEQYASTYRVVSVLTVLHQDWLNGKEYKCKVSNKALPAPIEKTISKAKGQPREPQVYTLPPSREEMTKNQVSLTCLVKGFYPSDIAVEWESNGQPENNYKTTPPVLDSDGSFFLYSKLTVDKSRWQQGNVFSCSVMHEALHNHYTQKSLSLSPG

SEQ ID NO: 1438 - protein, 451 aa, Synthetic construct
QVQLQESGPGLVKPSGTLSLTCAVSGGSISNDNWWNWVRQSPGKGLEWIGKIYHSGFTDYNPSLKSRVTISVDKSKNQFSLKLSSVTAADTAVYYCARGNHNYLWIGYLGTWGPGTLVTVSSASTKGPSVFPLAPSSKSTSGGTAALGCLVKDYFPEPVTVSWNSGALTSGVHTFPAVLQSSGLYSLSSVVTVPSSSLGTQTYICNVNHKPSNTKVDKRVEPKSCDKTHTCPPCPAPELLGGPSVFLFPPKPKDTLMISRTPEVTCVVVDVSHEDPEVKFNWYVDGVEVHNAKTKPREEQYASTYRVVSVLTVLHQDWLNGKEYKCKVSNKALPAPIEKTISKAKGQPREPQVYTLPPSREEMTKNQVSLTCLVKGFYPSDIAVEWESNGQPENNYKTTPPVLDSDGSFFLYSKLTVDKSRWQQGNVFSCSVMHEALHNHYTQKSLSLSPG

SEQ ID NO: 1439 - protein, 448 aa, Synthetic construct
QVQLQESGPGLVKPSGTLSLICAVSGGSISSSNWWSWVRQPPGKGLEWIGRIYHSGHTNYNPSLKSRVTISVDKSKNQFSLKLTSVTAADTAVYYCARGRDLTGYFDYWGQGTLVTVSSASTKGPSVFPLAPSSKSTSGGTAALGCLVKDYFPEPVTVSWNSGALTSGVHTFPAVLQSSGLYSLSSVVTVPSSSLGTQTYICNVNHKPSNTKVDKRVEPKSCDKTHTCPPCPAPELLGGPSVFLFPPKPKDTLMISRTPEVTCVVVDVSHEDPEVKFNWYVDGVEVHNAKTKPREEQYASTYRVVSVLTVLHQDWLNGKEYKCKVSNKALPAPIEKTISKAKGQPREPQVYTLPPSREEMTKNQVSLTCLVKGFYPSDIAVEWESNGQPENNYKTTPPVLDSDGSFFLYSKLTVDKSRWQQGNVFSCSVMHEALHNHYTQKSLSLSPG

SEQ ID NO: 1440 - protein, 450 aa, Synthetic construct
QVQLQESGPGLVKPSGTLSLTCAVSGGSISNDNWWSWVRQSPGKGLEWIGKIYHSEFTNYNPSLKSRVTISVDKSKNQFSLELSSVTAADTAVYYCARGVDFWSGSHMDVWGKGTTVTVSSASTKGPSVFPLAPSSKSTSGGTAALGCLVKDYFPEPVTVSWNSGALTSGVHTFPAVLQSSGLYSLSSVVTVPSSSLGTQTYICNVNHKPSNTKVDKRVEPKSCDKTHTCPPCPAPELLGGPSVFLFPPKPKDTLMISRTPEVTCVVVDVSHEDPEVKFNWYVDGVEVHNAKTKPREEQYASTYRVVSVLTVLHQDWLNGKEYKCKVSNKALPAPIEKTISKAKGQPREPQVYTLPPSREEMTKNQVSLTCLVKGFYPSDIAVEWESNGQPENNYKTTPPVLDSDGSFFLYSKLTVDKSRWQQGNVFSCSVMHEALHNHYTQKSLSLSPG

SEQ ID NO: 1441 - protein, 448 aa, Synthetic construct
QVQLQESGPGLVKPSGTLSLTCAVSGGSISNDNWWSWVRQSPGKGLEWIGKIYHSEFTNYNPSLKSRVTISVDKSKNQFSLELSSVTAADTAVYFCAREGLELPHMDVWGKGTTVTVSSASTKGPSVFPLAPSSKSTSGGTAALGCLVKDYFPEPVTVSWNSGALTSGVHTFPAVLQSSGLYSLSSVVTVPSSSLGTQTYICNVNHKPSNTKVDKRVEPKSCDKTHTCPPCPAPELLGGPSVFLFPPKPKDTLMISRTPEVTCVVVDVSHEDPEVKFNWYVDGVEVHNAKTKPREEQYASTYRVVSVLTVLHQDWLNGKEYKCKVSNKALPAPIEKTISKAKGQPREPQVYTLPPSREEMTKNQVSLTCLVKGFYPSDIAVEWESNGQPENNYKTTPPVLDSDGSFFLYSKLTVDKSRWQQGNVFSCSVMHEALHNHYTQKSLSLSPG

SEQ ID NO: 1442 - protein, 446 aa, Synthetic construct
EVQLVESGGGVVKPGGSLRLSCAASGFTFSSYWMHWVRQAPGKGLVWVSRINSDGSSTSYADSVQGRFTISRDIAKNTLYLQMNSLRAEDTAVYYCARGQHLVQDYWGQGTLVTVSSASTKGPSVFPLAPSSKSTSGGTAALGCLVKDYFPEPVTVSWNSGALTSGVHTFPAVLQSSGLYSLSSVVTVPSSSLGTQTYICNVNHKPSNTKVDKRVEPKSCDKTHTCPPCPAPELLGGPSVFLFPPKPKDTLMISRTPEVTCVVVDVSHEDPEVKFNWYVDGVEVHNAKTKPREEQYASTYRVVSVLTVLHQDWLNGKEYKCKVSNKALPAPIEKTISKAKGQPREPQVYTLPPSREEMTKNQVSLTCLVKGFYPSDIAVEWESNGQPENNYKTTPPVLDSDGSFFLYSKLTVDKSRWQQGNVFSCSVMHEALHNHYTQKSLSLSPG

SEQ ID NO: 1443 - protein, 450 aa, Synthetic construct
QVQLVQSGAEVKNPGASVKVSCKASGYTFTGYYMHWVRQAPGQGLEWMGWINPNSGGTNYAQKFQGRVTMTRDTSISTAYMELSRLRSDDTAVYYCARERGDYDGDAFDIWGQGTMVTVSSASTKGPSVFPLAPSSKSTSGGTAALGCLVKDYFPEPVTVSWNSGALTSGVHTFPAVLQSSGLYSLSSVVTVPSSSLGTQTYICNVNHKPSNTKVDKRVEPKSCDKTHTCPPCPAPELLGGPSVFLFPPKPKDTLMISRTPEVTCVVVDVSHEDPEVKFNWYVDGVEVHNAKTKPREEQYASTYRVVSVLTVLHQDWLNGKEYKCKVSNKALPAPIEKTISKAKGQPREPQVYTLPPSREEMTKNQVSLTCLVKGFYPSDIAVEWESNGQPENNYKTTPPVLDSDGSFFLYSKLTVDKSRWQQGNVFSCSVMHEALHNHYTQKSLSLSPG

SEQ ID NO: 1444 - protein, 449 aa, Synthetic construct
EVQLVESGGGLVQPGGSLRLSCAASGFTFSNYYMNWVRQAPGKGLEWVANIKQDGSEKYYVDSVKGRFTISRDNAKNSLYLQMNSLRAEDTAVYYCARDGYYNFDAFDIWGQGTMVTVSSASTKGPSVFPLAPSSKSTSGGTAALGCLVKDYFPEPVTVSWNSGALTSGVHTFPAVLQSSGLYSLSSVVTVPSSSLGTQTYICNVNHKPSNTKVDKRVEPKSCDKTHTCPPCPAPELLGGPSVFLFPPKPKDTLMISRTPEVTCVVVDVSHEDPEVKFNWYVDGVEVHNAKTKPREEQYASTYRVVSVLTVLHQDWLNGKEYKCKVSNKALPAPIEKTISKAKGQPREPQVYTLPPSREEMTKNQVSLTCLVKGFYPSDIAVEWESNGQPENNYKTTPPVLDSDGSFFLYSKLTVDKSRWQQGNVFSCSVMHEALHNHYTQKSLSLSPG

SEQ ID NO: 1445 - protein, 450 aa, Synthetic construct
EVQLVESGGGLVQPGGSLRLSCAASGFTFSSYSMNWVRQAPGKGLEWVSSISSSSSYIYYADSVKGRFTISRDNAKNSLYLQMNSLRAEDTAVYYCAREGYDNWNSACDIWGQGTMVTVSSASTKGPSVFPLAPSSKSTSGGTAALGCLVKDYFPEPVTVSWNSGALTSGVHTFPAVLQSSGLYSLSSVVTVPSSSLGTQTYICNVNHKPSNTKVDKRVEPKSCDKTHTCPPCPAPELLGGPSVFLFPPKPKDTLMISRTPEVTCVVVDVSHEDPEVKFNWYVDGVEVHNAKTKPREEQYASTYRVVSVLTVLHQDWLNGKEYKCKVSNKALPAPIEKTISKAKGQPREPQVYTLPPSREEMTKNQVSLTCLVKGFYPSDIAVEWESNGQPENNYKTTPPVLDSDGSFFLYSKLTVDKSRWQQGNVFSCSVMHEALHNHYTQKSLSLSPG

SEQ ID NO: 1446 - protein, 450 aa, Synthetic construct
QITLKESGPTLVKPTQTLTLTCTFSGFSLSTSGVGVGWIRQPPGKALEWLALIYWNGDERYSPSLKSRLTITKDTSKNQVVLTMTNMDPVDTATYYCAHSPNWGYEAFDIWGQGTMVTVSSASTKGPSVFPLAPSSKSTSGGTAALGCLVKDYFPEPVTVSWNSGALTSGVHTFPAVLQSSGLYSLSSVVTVPSSSLGTQTYICNVNHKPSNTKVDKRVEPKSCDKTHTCPPCPAPELLGGPSVFLFPPKPKDTLMISRTPEVTCVVVDVSHEDPEVKFNWYVDGVEVHNAKTKPREEQYASTYRVVSVLTVLHQDWLNGKEYKCKVSNKALPAPIEKTISKAKGQPREPQVYTLPPSREEMTKNQVSLTCLVKGFYPSDIAVEWESNGQPENNYKTTPPVLDSDGSFFLYSKLTVDKSRWQQGNVFSCSVMHEALHNHYTQKSLSLSPG

SEQ ID NO: 1447 - protein, 450 aa, Synthetic construct
EVQLVESGGGLVPPGGSLRLSCAASGFTFSSYCMNWVRQAPGKGLEWVSSINSDSSYIYYADSVKGRFTISRDNAKNSLYLQMNSLRAEDTAVYYCAREGYYNWNGGNDYWGQGTLVTVSSASTKGPSVFPLAPSSKSTSGGTAALGCLVKDYFPEPVTVSWNSGALTSGVHTFPAVLQSSGLYSLSSVVTVPSSSLGTQTYICNVNHKPSNTKVDKRVEPKSCDKTHTCPPCPAPELLGGPSVFLFPPKPKDTLMISRTPEVTCVVVDVSHEDPEVKFNWYVDGVEVHNAKTKPREEQYASTYRVVSVLTVLHQDWLNGKEYKCKVSNKALPAPIEKTISKAKGQPREPQVYTLPPSREEMTKNQVSLTCLVKGFYPSDIAVEWESNGQPENNYKTTPPVLDSDGSFFLYSKLTVDKSRWQQGNVFSCSVMHEALHNHYTQKSLSLSPG

SEQ ID NO: 1448 - protein, 449 aa, Synthetic construct
EVQLVESGGGLVQPGGSLRLSCAASGFTFSSYWMHWVRQAPGKGLVWVSHINSDGSSTNYADSVKGRFTISRDNAKNTLYLQMNSLRSEDTAVYYCAREGYWNGDTFDIWGQGTMVTVSSASTKGPSVFPLAPSSKSTSGGTAALGCLVKDYFPEPVTVSWNSGALTSGVHTFPAVLQSSGLYSLSSVVTVPSSSLGTQTYICNVNHKPSNTKVDKRVEPKSCDKTHTCPPCPAPELLGGPSVFLFPPKPKDTLMISRTPEVTCVVVDVSHEDPEVKFNWYVDGVEVHNAKTKPREEQYASTYRVVSVLTVLHQDWLNGKEYKCKVSNKALPAPIEKTISKAKGQPREPQVYTLPPSREEMTKNQVSLTCLVKGFYPSDIAVEWESNGQPENNYKTTPPVLDSDGSFFLYSKLTVDKSRWQQGNVFSCSVMHEALHNHYTQKSLSLSPG

SEQ ID NO: 1449 - protein, 450 aa, Synthetic construct
EVQLVESGGGLVQPGGSLRLSCAASGFTFSAYDMHWVRQTPGKGLEWVSTIGTAGDTYYPDSVKGRFTISRDFARRSLYLHMNNLRAGDTAVYYCARGGSSSWYDWYFDLWGRGTLVTVSSASTKGPSVFPLAPSSKSTSGGTAALGCLVKDYFPEPVTVSWNSGALTSGVHTFPAVLQSSGLYSLSSVVTVPSSSLGTQTYICNVNHKPSNTKVDKRVEPKSCDKTHTCPPCPAPELLGGPSVFLFPPKPKDTLMISRTPEVTCVVVDVSHEDPEVKFNWYVDGVEVHNAKTKPREEQYASTYRVVSVLTVLHQDWLNGKEYKCKVSNKALPAPIEKTISKAKGQPREPQVYTLPPSREEMTKNQVSLTCLVKGFYPSDIAVEWESNGQPENNYKTTPPVLDSDGSFFLYSKLTVDKSRWQQGNVFSCSVMHEALHNHYTQKSLSLSPG

SEQ ID NO: 1450 - protein, 450 aa, Synthetic construct
QVQLQESGPGLVKPSGTLSLTCAVSGGSISSSTWWSWVRQPPGKGLEWIGEIYHSGSTNYNPSLKSRVTISLDKSKNQFSLKLSSVTAADTAVYYCAISLYNWNDAAFDIWGQGTMVTVSSASTKGPSVFPLAPSSKSTSGGTAALGCLVKDYFPEPVTVSWNSGALTSGVHTFPAVLQSSGLYSLSSVVTVPSSSLGTQTYICNVNHKPSNTKVDKRVEPKSCDKTHTCPPCPAPELLGGPSVFLFPPKPKDTLMISRTPEVTCVVVDVSHEDPEVKFNWYVDGVEVHNAKTKPREEQYASTYRVVSVLTVLHQDWLNGKEYKCKVSNKALPAPIEKTISKAKGQPREPQVYTLPPSREEMTKNQVSLTCLVKGFYPSDIAVEWESNGQPENNYKTTPPVLDSDGSFFLYSKLTVDKSRWQQGNVFSCSVMHEALHNHYTQKSLSLSPG

SEQ ID NO: 1451 - protein, 449 aa, Synthetic construct
QVQLVQSGSEVKKPGASVKVSCKTSGYTFTGYYMHWVRQAPGQGLEWMGWINPNSGGTTYAQKFQGRVTMTRDTSISTAYMELNRLRSDDTAVYYCAREAGGSGEYFQHWGQGTPVTVSSASTKGPSVFPLAPSSKSTSGGTAALGCLVKDYFPEPVTVSWNSGALTSGVHTFPAVLQSSGLYSLSSVVTVPSSSLGTQTYICNVNHKPSNTKVDKRVEPKSCDKTHTCPPCPAPELLGGPSVFLFPPKPKDTLMISRTPEVTCVVVDVSHEDPEVKFNWYVDGVEVHNAKTKPREEQYASTYRVVSVLTVLHQDWLNGKEYKCKVSNKALPAPIEKTISKAKGQPREPQVYTLPPSREEMTKNQVSLTCLVKGFYPSDIAVEWESNGQPENNYKTTPPVLDSDGSFFLYSKLTVDKSRWQQGNVFSCSVMHEALHNHYTQKSLSLSPG

SEQ ID NO: 1452 - protein, 450 aa, Synthetic construct
QITLKESGPTLVKPTQTLTLTCTFSGFSLSTSGVGVGWIRQPPGKALEWLALIYWNDVKFYSPSLQSRLTITKDTSKNQVVLTLTNMDPVDTATYYCAHGDNWNYRAFDIWGQGTMVTVSSASTKGPSVFPLAPSSKSTSGGTAALGCLVKDYFPEPVTVSWNSGALTSGVHTFPAVLQSSGLYSLSSVVTVPSSSLGTQTYICNVNHKPSNTKVDKRVEPKSCDKTHTCPPCPAPELLGGPSVFLFPPKPKDTLMISRTPEVTCVVVDVSHEDPEVKFNWYVDGVEVHNAKTKPREEQYASTYRVVSVLTVLHQDWLNGKEYKCKVSNKALPAPIEKTISKAKGQPREPQVYTLPPSREEMTKNQVSLTCLVKGFYPSDIAVEWESNGQPENNYKTTPPVLDSDGSFFLYSKLTVDKSRWQQGNVFSCSVMHEALHNHYTQKSLSLSPG

SEQ ID NO: 1453 - protein, 445 aa, Synthetic construct
QVQLVQSGAEVKKPGASVKVSCKASGYTFTSYGISWVRQAPGQGLEWMGWISAYNGNTHYAQNLQGRVTMTTDTSTSTAYMELRSLRSDDTAVYYCARSIAALDFWGQGTPVTVSSASTKGPSVFPLAPSSKSTSGGTAALGCLVKDYFPEPVTVSWNSGALTSGVHTFPAVLQSSGLYSLSSVVTVPSSSLGTQTYICNVNHKPSNTKVDKRVEPKSCDKTHTCPPCPAPELLGGPSVFLFPPKPKDTLMISRTPEVTCVVVDVSHEDPEVKFNWYVDGVEVHNAKTKPREEQYASTYRVVSVLTVLHQDWLNGKEYKCKVSNKALPAPIEKTISKAKGQPREPQVYTLPPSREEMTKNQVSLTCLVKGFYPSDIAVEWESNGQPENNYKTTPPVLDSDGSFFLYSKLTVDKSRWQQGNVFSCSVMHEALHNHYTQKSLSLSPG

SEQ ID NO: 1454 - protein, 450 aa, Synthetic construct
QVQLQESGPGLVKPSGTLSLTCAVSGGSISSNNWWSWVRQPPGKGLEWIGQIYHSENTNYNPSLKSRVTISVDKSKNQFSLKLSSVTAADTAIYYCARVDDWNYGGHFDYWGQGTLVTVSSASTKGPSVFPLAPSSKSTSGGTAALGCLVKDYFPEPVTVSWNSGALTSGVHTFPAVLQSSGLYSLSSVVTVPSSSLGTQTYICNVNHKPSNTKVDKRVEPKSCDKTHTCPPCPAPELLGGPSVFLFPPKPKDTLMISRTPEVTCVVVDVSHEDPEVKFNWYVDGVEVHNAKTKPREEQYASTYRVVSVLTVLHQDWLNGKEYKCKVSNKALPAPIEKTISKAKGQPREPQVYTLPPSREEMTKNQVSLTCLVKGFYPSDIAVEWESNGQPENNYKTTPPVLDSDGSFFLYSKLTVDKSRWQQGNVFSCSVMHEALHNHYTQKSLSLSPG

SEQ ID NO: 1455 - protein, 445 aa, Synthetic construct
QVQLVQSGAEVKKPGASVKVSCKASGYTFTGYGISWVRQAPGQGLEWMGWISAYNGNTHYAQNLQGRVTMTTDTSTNTAYMELRSLISDDTAFYYCARAGLGIDYWGQGTLVTVSSASTKGPSVFPLAPSSKSTSGGTAALGCLVKDYFPEPVTVSWNSGALTSGVHTFPAVLQSSGLYSLSSVVTVPSSSLGTQTYICNVNHKPSNTKVDKRVEPKSCDKTHTCPPCPAPELLGGPSVFLFPPKPKDTLMISRTPEVTCVVVDVSHEDPEVKFNWYVDGVEVHNAKTKPREEQYASTYRVVSVLTVLHQDWLNGKEYKCKVSNKALPAPIEKTISKAKGQPREPQVYTLPPSREEMTKNQVSLTCLVKGFYPSDIAVEWESNGQPENNYKTTPPVLDSDGSFFLYSKLTVDKSRWQQGNVFSCSVMHEALHNHYTQKSLSLSPG

SEQ ID NO: 1456 - protein, 449 aa, Synthetic construct
QVQLQESGPGLVKPSGTLSLTCAVSGGSISSSDWWSWVRQSPGKGLEWIGEIYHSGSTNYNPSLKSRVSISVDKSKNQFSLKLSSVTAADTAVYYCARGGHIGYYYMDVWGKGTTVTVSSASTKGPSVFPLAPSSKSTSGGTAALGCLVKDYFPEPVTVSWNSGALTSGVHTFPAVLQSSGLYSLSSVVTVPSSSLGTQTYICNVNHKPSNTKVDKRVEPKSCDKTHTCPPCPAPELLGGPSVFLFPPKPKDTLMISRTPEVTCVVVDVSHEDPEVKFNWYVDGVEVHNAKTKPREEQYASTYRVVSVLTVLHQDWLNGKEYKCKVSNKALPAPIEKTISKAKGQPREPQVYTLPPSREEMTKNQVSLTCLVKGFYPSDIAVEWESNGQPENNYKTTPPVLDSDGSFFLYSKLTVDKSRWQQGNVFSCSVMHEALHNHYTQKSLSLSPG

SEQ ID NO: 1457 - protein, 451 aa, Synthetic construct
EVQLVQSGAEVKKPGESLKISCKGSGYSFTNYWIGWVRQMPGKGLEWMGIIYPGDSDTIYSPSFQGQVTFSADKSINTAYLQWSSLKASDTAMYYCARGRGYSGYEGAFDIWGQGTMVTVSSASTKGPSVFPLAPSSKSTSGGTAALGCLVKDYFPEPVTVSWNSGALTSGVHTFPAVLQSSGLYSLSSVVTVPSSSLGTQTYICNVNHKPSNTKVDKRVEPKSCDKTHTCPPCPAPELLGGPSVFLFPPKPKDTLMISRTPEVTCVVVDVSHEDPEVKFNWYVDGVEVHNAKTKPREEQYASTYRVVSVLTVLHQDWLNGKEYKCKVSNKALPAPIEKTISKAKGQPREPQVYTLPPSREEMTKNQVSLTCLVKGFYPSDIAVEWESNGQPENNYKTTPPVLDSDGSFFLYSKLTVDKSRWQQGNVFSCSVMHEALHNHYTQKSLSLSPG

SEQ ID NO: 1458 - protein, 445 aa, Synthetic construct
QVQLVQSGAEVKKPGASVKVSCKASGYTFTNYGISWVRQAPGQGLEWMGWISAYNGNTHYAQKLQGRVTMTTDTSTSTAYMELRSLRSDDTAVYYCARAAAAVDYWGQGTLVTVSSASTKGPSVFPLAPSSKSTSGGTAALGCLVKDYFPEPVTVSWNSGALTSGVHTFPAVLQSSGLYSLSSVVTVPSSSLGTQTYICNVNHKPSNTKVDKRVEPKSCDKTHTCPPCPAPELLGGPSVFLFPPKPKDTLMISRTPEVTCVVVDVSHEDPEVKFNWYVDGVEVHNAKTKPREEQYASTYRVVSVLTVLHQDWLNGKEYKCKVSNKALPAPIEKTISKAKGQPREPQVYTLPPSREEMTKNQVSLTCLVKGFYPSDIAVEWESNGQPENNYKTTPPVLDSDGSFFLYSKLTVDKSRWQQGNVFSCSVMHEALHNHYTQKSLSLSPG

SEQ ID NO: 1459 - protein, 451 aa, Synthetic construct
QVQLQESGPGLVKPSETLSLSCTVSGGSVSSGSYYWSWIRQPPGKGLEWIGYIYYSGSTKYNPSLKSRVTISVDTSKNQVSLKLSSVTAADTAVYYCARDKGHWNYGAFDIWGQGTMVTVSSASTKGPSVFPLAPSSKSTSGGTAALGCLVKDYFPEPVTVSWNSGALTSGVHTFPAVLQSSGLYSLSSVVTVPSSSLGTQTYICNVNHKPSNTKVDKRVEPKSCDKTHTCPPCPAPELLGGPSVFLFPPKPKDTLMISRTPEVTCVVVDVSHEDPEVKFNWYVDGVEVHNAKTKPREEQYASTYRVVSVLTVLHQDWLNGKEYKCKVSNKALPAPIEKTISKAKGQPREPQVYTLPPSREEMTKNQVSLTCLVKGFYPSDIAVEWESNGQPENNYKTTPPVLDSDGSFFLYSKLTVDKSRWQQGNVFSCSVMHEALHNHYTQKSLSLSPG

SEQ ID NO: 1460 - protein, 451 aa, Synthetic construct
QVQLQESGPGLVKPSGTLSLTCAVSGGSISSNNWWSWVRQPPGKGLEWIGEIYHSGNINYNPSLKSRVTISVDKSKNQFSLKLSSVTAADTAVYYCARGGEYGDPVGYFDLWGRGTLVTVSSASTKGPSVFPLAPSSKSTSGGTAALGCLVKDYFPEPVTVSWNSGALTSGVHTFPAVLQSSGLYSLSSVVTVPSSSLGTQTYICNVNHKPSNTKVDKRVEPKSCDKTHTCPPCPAPELLGGPSVFLFPPKPKDTLMISRTPEVTCVVVDVSHEDPEVKFNWYVDGVEVHNAKTKPREEQYASTYRVVSVLTVLHQDWLNGKEYKCKVSNKALPAPIEKTISKAKGQPREPQVYTLPPSREEMTKNQVSLTCLVKGFYPSDIAVEWESNGQPENNYKTTPPVLDSDGSFFLYSKLTVDKSRWQQGNVFSCSVMHEALHNHYTQKSLSLSPG

SEQ ID NO: 1461 - protein, 448 aa, Synthetic construct
QVQLVQSGAEVKKPGASVKVSCKASGYTFTTYGISWVRQAPGQGLEWMGWISAYSGNTNYAQKLQGRVTMTTDTSTSTAYMELRSLRSDDTAVYYCARERVSNWVFDFWGQGTLVTVSSASTKGPSVFPLAPSSKSTSGGTAALGCLVKDYFPEPVTVSWNSGALTSGVHTFPAVLQSSGLYSLSSVVTVPSSSLGTQTYICNVNHKPSNTKVDKRVEPKSCDKTHTCPPCPAPELLGGPSVFLFPPKPKDTLMISRTPEVTCVVVDVSHEDPEVKFNWYVDGVEVHNAKTKPREEQYASTYRVVSVLTVLHQDWLNGKEYKCKVSNKALPAPIEKTISKAKGQPREPQVYTLPPSREEMTKNQVSLTCLVKGFYPSDIAVEWESNGQPENNYKTTPPVLDSDGSFFLYSKLTVDKSRWQQGNVFSCSVMHEALHNHYTQKSLSLSPG

SEQ ID NO: 1462 - protein, 449 aa, Synthetic construct
QVQLQESGPGLVKPSGTLSLTCAVSGGSISSSDWWSWVRQPPGKGLEWIGEIYHSRNTNYNPSLKSRVTISVDKSKNQFSLKLSSVTAADTAVYYCASGGVVADYYMDVWGKGTTVTVSSASTKGPSVFPLAPSSKSTSGGTAALGCLVKDYFPEPVTVSWNSGALTSGVHTFPAVLQSSGLYSLSSVVTVPSSSLGTQTYICNVNHKPSNTKVDKRVEPKSCDKTHTCPPCPAPELLGGPSVFLFPPKPKDTLMISRTPEVTCVVVDVSHEDPEVKFNWYVDGVEVHNAKTKPREEQYASTYRVVSVLTVLHQDWLNGKEYKCKVSNKALPAPIEKTISKAKGQPREPQVYTLPPSREEMTKNQVSLTCLVKGFYPSDIAVEWESNGQPENNYKTTPPVLDSDGSFFLYSKLTVDKSRWQQGNVFSCSVMHEALHNHYTQKSLSLSPG

SEQ ID NO: 1463 - protein, 452 aa, Synthetic construct
EVQLVESGGGLVKPGGSLRLSCAASGFTFSSYGMNWVRQAPGKGLEWVSSISGYGSYIYYAASVKGRFTISRDSAKNSLYLQMNSLSAEDTAVYYCARELGGIYYGVGYFDLWGRGTLVTVSSASTKGPSVFPLAPSSKSTSGGTAALGCLVKDYFPEPVTVSWNSGALTSGVHTFPAVLQSSGLYSLSSVVTVPSSSLGTQTYICNVNHKPSNTKVDKRVEPKSCDKTHTCPPCPAPELLGGPSVFLFPPKPKDTLMISRTPEVTCVVVDVSHEDPEVKFNWYVDGVEVHNAKTKPREEQYASTYRVVSVLTVLHQDWLNGKEYKCKVSNKALPAPIEKTISKAKGQPREPQVYTLPPSREEMTKNQVSLTCLVKGFYPSDIAVEWESNGQPENNYKTTPPVLDSDGSFFLYSKLTVDKSRWQQGNVFSCSVMHEALHNHYTQKSLSLSPG

SEQ ID NO: 1464 - protein, 451 aa, Synthetic construct
QVQLQESGPGLVKPSETLSLTCAVSGGSVSSGNYYWSWIRQPPGKGLEWIGYIYSSGSTNYNPSLKSRVTISIDTSKNQFSLKLSSVTAADTAVYYCARSPRGYSYGPFAYWGQGTLVTVSSASTKGPSVFPLAPSSKSTSGGTAALGCLVKDYFPEPVTVSWNSGALTSGVHTFPAVLQSSGLYSLSSVVTVPSSSLGTQTYICNVNHKPSNTKVDKRVEPKSCDKTHTCPPCPAPELLGGPSVFLFPPKPKDTLMISRTPEVTCVVVDVSHEDPEVKFNWYVDGVEVHNAKTKPREEQYASTYRVVSVLTVLHQDWLNGKEYKCKVSNKALPAPIEKTISKAKGQPREPQVYTLPPSREEMTKNQVSLTCLVKGFYPSDIAVEWESNGQPENNYKTTPPVLDSDGSFFLYSKLTVDKSRWQQGNVFSCSVMHEALHNHYTQKSLSLSPG

SEQ ID NO: 1465 - protein, 451 aa, Synthetic construct
QVQLQESGPGLVKPSQTLSLTCTVSGGSISSGGYNWNWIRQHPGKGLEWIGYINYSGNTYYNPSLKSRVTISVDTSKNQFSLKLSSVTAADTAVYYCARGPLDTAMAPFDYWGQGTLVTVSSASTKGPSVFPLAPSSKSTSGGTAALGCLVKDYFPEPVTVSWNSGALTSGVHTFPAVLQSSGLYSLSSVVTVPSSSLGTQTYICNVNHKPSNTKVDKRVEPKSCDKTHTCPPCPAPELLGGPSVFLFPPKPKDTLMISRTPEVTCVVVDVSHEDPEVKFNWYVDGVEVHNAKTKPREEQYASTYRVVSVLTVLHQDWLNGKEYKCKVSNKALPAPIEKTISKAKGQPREPQVYTLPPSREEMTKNQVSLTCLVKGFYPSDIAVEWESNGQPENNYKTTPPVLDSDGSFFLYSKLTVDKSRWQQGNVFSCSVMHEALHNHYTQKSLSLSPG

SEQ ID NO: 1466 - protein, 449 aa, Synthetic construct
QVQLQESGPGLVKPSETLSLTCTVSGDSISSYYWSWIRQPPGKGLEWIGYIYYSGFTKYNPSLKSRVTISVDTSKNQFSLRLSSVTAADTAVYYCASVDSKWNYGSFHIWGQGTMVTVSSASTKGPSVFPLAPSSKSTSGGTAALGCLVKDYFPEPVTVSWNSGALTSGVHTFPAVLQSSGLYSLSSVVTVPSSSLGTQTYICNVNHKPSNTKVDKRVEPKSCDKTHTCPPCPAPELLGGPSVFLFPPKPKDTLMISRTPEVTCVVVDVSHEDPEVKFNWYVDGVEVHNAKTKPREEQYASTYRVVSVLTVLHQDWLNGKEYKCKVSNKALPAPIEKTISKAKGQPREPQVYTLPPSREEMTKNQVSLTCLVKGFYPSDIAVEWESNGQPENNYKTTPPVLDSDGSFFLYSKLTVDKSRWQQGNVFSCSVMHEALHNHYTQKSLSLSPG

SEQ ID NO: 1467 - protein, 454 aa, Synthetic construct
QVQLQESGPGLVKPSETLSLTCSVSGDSVSNNRYYWSWIRQPPGKGLEWIGYIYYSGSTNYNPSLKSRVTISVDTSKNQLSLNLSSVTAADTAVYYCARDRPSRYKWNYDAFAIWGQGTMVTVSSASTKGPSVFPLAPSSKSTSGGTAALGCLVKDYFPEPVTVSWNSGALTSGVHTFPAVLQSSGLYSLSSVVTVPSSSLGTQTYICNVNHKPSNTKVDKRVEPKSCDKTHTCPPCPAPELLGGPSVFLFPPKPKDTLMISRTPEVTCVVVDVSHEDPEVKFNWYVDGVEVHNAKTKPREEQYASTYRVVSVLTVLHQDWLNGKEYKCKVSNKALPAPIEKTISKAKGQPREPQVYTLPPSREEMTKNQVSLTCLVKGFYPSDIAVEWESNGQPENNYKTTPPVLDSDGSFFLYSKLTVDKSRWQQGNVFSCSVMHEALHNHYTQKSLSLSPG

SEQ ID NO: 1468 - protein, 448 aa, Synthetic construct
QVQLQQWGAGLLKPSETLSLTCAVYGGSFSDYYWTWIRQPPGKGLEWIGEVNHIGSTNYNPSLKSRVTISVDTSKNQFSLNLSSVTAADTAVYYCAKYSTSWYGWFDPWGQGTLVTVSSASTKGPSVFPLAPSSKSTSGGTAALGCLVKDYFPEPVTVSWNSGALTSGVHTFPAVLQSSGLYSLSSVVTVPSSSLGTQTYICNVNHKPSNTKVDKRVEPKSCDKTHTCPPCPAPELLGGPSVFLFPPKPKDTLMISRTPEVTCVVVDVSHEDPEVKFNWYVDGVEVHNAKTKPREEQYASTYRVVSVLTVLHQDWLNGKEYKCKVSNKALPAPIEKTISKAKGQPREPQVYTLPPSREEMTKNQVSLTCLVKGFYPSDIAVEWESNGQPENNYKTTPPVLDSDGSFFLYSKLTVDKSRWQQGNVFSCSVMHEALHNHYTQKSLSLSPG

SEQ ID NO: 1469 - protein, 451 aa, Synthetic construct
QVQLQESGPGLVKPSGTLSLTCAVSGDSISSNNWWSWFRQPPGKGLEWIGRIYHSGTTNYNPSLESRVTISVDNSRNQFSLKLSSVTAADTAVYYCARGEEWELRGGVFDIWGQGTMVTVSSASTKGPSVFPLAPSSKSTSGGTAALGCLVKDYFPEPVTVSWNSGALTSGVHTFPAVLQSSGLYSLSSVVTVPSSSLGTQTYICNVNHKPSNTKVDKRVEPKSCDKTHTCPPCPAPELLGGPSVFLFPPKPKDTLMISRTPEVTCVVVDVSHEDPEVKFNWYVDGVEVHNAKTKPREEQYASTYRVVSVLTVLHQDWLNGKEYKCKVSNKALPAPIEKTISKAKGQPREPQVYTLPPSREEMTKNQVSLTCLVKGFYPSDIAVEWESNGQPENNYKTTPPVLDSDGSFFLYSKLTVDKSRWQQGNVFSCSVMHEALHNHYTQKSLSLSPG

SEQ ID NO: 1470 - protein, 445 aa, Synthetic construct
QVQLVQSGPELKKPGASVKVSCKASGYTFTNYAVNWVRQAPGQGLEWMGWINTNTGHPTYAQGFTGRFVFSLDTSVSTAYLQISSLKAEDTAVYYCARDSSSWGYWGQGTLVTVSSASTKGPSVFPLAPSSKSTSGGTAALGCLVKDYFPEPVTVSWNSGALTSGVHTFPAVLQSSGLYSLSSVVTVPSSSLGTQTYICNVNHKPSNTKVDKRVEPKSCDKTHTCPPCPAPELLGGPSVFLFPPKPKDTLMISRTPEVTCVVVDVSHEDPEVKFNWYVDGVEVHNAKTKPREEQYASTYRVVSVLTVLHQDWLNGKEYKCKVSNKALPAPIEKTISKAKGQPREPQVYTLPPSREEMTKNQVSLTCLVKGFYPSDIAVEWESNGQPENNYKTTPPVLDSDGSFFLYSKLTVDKSRWQQGNVFSCSVMHEALHNHYTQKSLSLSPG

SEQ ID NO: 1471 - protein, 448 aa, Synthetic construct
QVQLQESGPGLVTPSGTLSLTCAVSGDSISSDNWWSWVRQPPGKGLEWIGEIYHSENTNYNPSLKSRVTISVDKSKNQFSLRLNSVTAADTAMYYCARGRELTGLFDYWGQGTLVTVSSASTKGPSVFPLAPSSKSTSGGTAALGCLVKDYFPEPVTVSWNSGALTSGVHTFPAVLQSSGLYSLSSVVTVPSSSLGTQTYICNVNHKPSNTKVDKRVEPKSCDKTHTCPPCPAPELLGGPSVFLFPPKPKDTLMISRTPEVTCVVVDVSHEDPEVKFNWYVDGVEVHNAKTKPREEQYASTYRVVSVLTVLHQDWLNGKEYKCKVSNKALPAPIEKTISKAKGQPREPQVYTLPPSREEMTKNQVSLTCLVKGFYPSDIAVEWESNGQPENNYKTTPPVLDSDGSFFLYSKLTVDKSRWQQGNVFSCSVMHEALHNHYTQKSLSLSPG

SEQ ID NO: 1472 - protein, 449 aa, Synthetic construct
QVQLQESGPGLVKPSGTLSLTCAVSGGSISSNNWWSWVRQPPGKGLEWIGDIYHSGNTNYNPSLKSRVTLSVDMSKNQFSLKLNSVTAADTAVYYCARGGIAVTAYFDYWGQGTLVTVSSASTKGPSVFPLAPSSKSTSGGTAALGCLVKDYFPEPVTVSWNSGALTSGVHTFPAVLQSSGLYSLSSVVTVPSSSLGTQTYICNVNHKPSNTKVDKRVEPKSCDKTHTCPPCPAPELLGGPSVFLFPPKPKDTLMISRTPEVTCVVVDVSHEDPEVKFNWYVDGVEVHNAKTKPREEQYASTYRVVSVLTVLHQDWLNGKEYKCKVSNKALPAPIEKTISKAKGQPREPQVYTLPPSREEMTKNQVSLTCLVKGFYPSDIAVEWESNGQPENNYKTTPPVLDSDGSFFLYSKLTVDKSRWQQGNVFSCSVMHEALHNHYTQKSLSLSPG

SEQ ID NO: 1473 - protein, 451 aa, Synthetic construct
QVQLVQSGAEVKKPGASVKVSCKASGYTFTGYYLHWVRQAPGQGLEWMGWINPHSGGTIYAQKFQDRVTMTRDTSISTAYMELSRLRSDDTAVYYCANWNSGDSYYYYMDVWGKGTTVTVSSASTKGPSVFPLAPSSKSTSGGTAALGCLVKDYFPEPVTVSWNSGALTSGVHTFPAVLQSSGLYSLSSVVTVPSSSLGTQTYICNVNHKPSNTKVDKRVEPKSCDKTHTCPPCPAPELLGGPSVFLFPPKPKDTLMISRTPEVTCVVVDVSHEDPEVKFNWYVDGVEVHNAKTKPREEQYASTYRVVSVLTVLHQDWLNGKEYKCKVSNKALPAPIEKTISKAKGQPREPQVYTLPPSREEMTKNQVSLTCLVKGFYPSDIAVEWESNGQPENNYKTTPPVLDSDGSFFLYSKLTVDKSRWQQGNVFSCSVMHEALHNHYTQKSLSLSPG

SEQ ID NO: 1474 - protein, 450 aa, Synthetic construct
QVQLQESGPGLVKPSGTLSLTCAVSGGSISSDNWWNWVRQPPGKGLEWIGKIYHSGNTNYNPSLKSRVTISVDESKNQFSLRLYSVTAADTAVYYCARGVDFWSGSHMDVWGKGTTVTVSSASTKGPSVFPLAPSSKSTSGGTAALGCLVKDYFPEPVTVSWNSGALTSGVHTFPAVLQSSGLYSLSSVVTVPSSSLGTQTYICNVNHKPSNTKVDKRVEPKSCDKTHTCPPCPAPELLGGPSVFLFPPKPKDTLMISRTPEVTCVVVDVSHEDPEVKFNWYVDGVEVHNAKTKPREEQYASTYRVVSVLTVLHQDWLNGKEYKCKVSNKALPAPIEKTISKAKGQPREPQVYTLPPSREEMTKNQVSLTCLVKGFYPSDIAVEWESNGQPENNYKTTPPVLDSDGSFFLYSKLTVDKSRWQQGNVFSCSVMHEALHNHYTQKSLSLSPG

SEQ ID NO: 1475 - protein, 449 aa, Synthetic construct
QVQLQESGPGLVKPSGTLSLTCAVSGGSISSNNWWSWVRQAPGKGLEWIGKIYQSGSTMYNPSLKSRVTMSVDKSKNQFSLILSSVTAADTAVYYCARDKPPLLGAFDYWGQGTLVTVSSASTKGPSVFPLAPSSKSTSGGTAALGCLVKDYFPEPVTVSWNSGALTSGVHTFPAVLQSSGLYSLSSVVTVPSSSLGTQTYICNVNHKPSNTKVDKRVEPKSCDKTHTCPPCPAPELLGGPSVFLFPPKPKDTLMISRTPEVTCVVVDVSHEDPEVKFNWYVDGVEVHNAKTKPREEQYASTYRVVSVLTVLHQDWLNGKEYKCKVSNKALPAPIEKTISKAKGQPREPQVYTLPPSREEMTKNQVSLTCLVKGFYPSDIAVEWESNGQPENNYKTTPPVLDSDGSFFLYSKLTVDKSRWQQGNVFSCSVMHEALHNHYTQKSLSLSPG

SEQ ID NO: 1476 - protein, 449 aa, Synthetic construct
QVQLVESGGGVVQPGRSLRLSCAASGFTFSSYAMHWVRQAPGKGLEWVAVISYDGSNKYYADSVKGRFTISRDNSKNTLSLQMNSLRAEDTAVYYCAKRGGYSYGPFEHWGQGTLVTVSSASTKGPSVFPLAPSSKSTSGGTAALGCLVKDYFPEPVTVSWNSGALTSGVHTFPAVLQSSGLYSLSSVVTVPSSSLGTQTYICNVNHKPSNTKVDKRVEPKSCDKTHTCPPCPAPELLGGPSVFLFPPKPKDTLMISRTPEVTCVVVDVSHEDPEVKFNWYVDGVEVHNAKTKPREEQYASTYRVVSVLTVLHQDWLNGKEYKCKVSNKALPAPIEKTISKAKGQPREPQVYTLPPSREEMTKNQVSLTCLVKGFYPSDIAVEWESNGQPENNYKTTPPVLDSDGSFFLYSKLTVDKSRWQQGNVFSCSVMHEALHNHYTQKSLSLSPG

SEQ ID NO: 1477 - protein, 447 aa, Synthetic construct
QVQLVQSGSELKKPGASVKVSCKASGYTFTSYTMNWVRQAPGQGLEWVGWINTATGTPTYAQGFTGRYVFSLDTSVSTAYLQISGLKAEDTAVYFCARYSGSHSFDYWGQGTLVTVSSASTKGPSVFPLAPSSKSTSGGTAALGCLVKDYFPEPVTVSWNSGALTSGVHTFPAVLQSSGLYSLSSVVTVPSSSLGTQTYICNVNHKPSNTKVDKRVEPKSCDKTHTCPPCPAPELLGGPSVFLFPPKPKDTLMISRTPEVTCVVVDVSHEDPEVKFNWYVDGVEVHNAKTKPREEQYASTYRVVSVLTVLHQDWLNGKEYKCKVSNKALPAPIEKTISKAKGQPREPQVYTLPPSREEMTKNQVSLTCLVKGFYPSDIAVEWESNGQPENNYKTTPPVLDSDGSFFLYSKLTVDKSRWQQGNVFSCSVMHEALHNHYTQKSLSLSPG

SEQ ID NO: 1478 - protein, 448 aa, Synthetic construct
QVQLQESGPGLVKPSGTLSLTCAVSGGSISSDYWWSWVRQSPGKGLEWIGKIYHSGNTNHNPSLKSRVTISIDKSRNQFSLNLNSVTAADTAVYYCAREGLELPHMDVWGKGTTVTVSSASTKGPSVFPLAPSSKSTSGGTAALGCLVKDYFPEPVTVSWNSGALTSGVHTFPAVLQSSGLYSLSSVVTVPSSSLGTQTYICNVNHKPSNTKVDKRVEPKSCDKTHTCPPCPAPELLGGPSVFLFPPKPKDTLMISRTPEVTCVVVDVSHEDPEVKFNWYVDGVEVHNAKTKPREEQYASTYRVVSVLTVLHQDWLNGKEYKCKVSNKALPAPIEKTISKAKGQPREPQVYTLPPSREEMTKNQVSLTCLVKGFYPSDIAVEWESNGQPENNYKTTPPVLDSDGSFFLYSKLTVDKSRWQQGNVFSCSVMHEALHNHYTQKSLSLSPG

SEQ ID NO: 1479 - protein, 449 aa, Synthetic construct
QVQLVESGGGLVQPGRSLRLSCAASGFTFSSYAMHWVRQAPGKGLEWVTVISYDGSNKYYADSVKGRFTISRDNSKNTLYLQMNSLRAEDTAVYYCAKRGNWNYGPFHYWGQGTLVTVSSASTKGPSVFPLAPSSKSTSGGTAALGCLVKDYFPEPVTVSWNSGALTSGVHTFPAVLQSSGLYSLSSVVTVPSSSLGTQTYICNVNHKPSNTKVDKRVEPKSCDKTHTCPPCPAPELLGGPSVFLFPPKPKDTLMISRTPEVTCVVVDVSHEDPEVKFNWYVDGVEVHNAKTKPREEQYASTYRVVSVLTVLHQDWLNGKEYKCKVSNKALPAPIEKTISKAKGQPREPQVYTLPPSREEMTKNQVSLTCLVKGFYPSDIAVEWESNGQPENNYKTTPPVLDSDGSFFLYSKLTVDKSRWQQGNVFSCSVMHEALHNHYTQKSLSLSPG

SEQ ID NO: 1480 - protein, 444 aa, Synthetic construct
QVQLVESGGGVVQPGRSLRLSCAASGFTFSAYAIHWVRQAPGKGLEWVAVISYDGSNKKYADSVKGRFTISRDNSKNTLDLEMNSLRAEDTAVYYCAKGLPFDYWGQGTLVTVSSASTKGPSVFPLAPSSKSTSGGTAALGCLVKDYFPEPVTVSWNSGALTSGVHTFPAVLQSSGLYSLSSVVTVPSSSLGTQTYICNVNHKPSNTKVDKRVEPKSCDKTHTCPPCPAPELLGGPSVFLFPPKPKDTLMISRTPEVTCVVVDVSHEDPEVKFNWYVDGVEVHNAKTKPREEQYASTYRVVSVLTVLHQDWLNGKEYKCKVSNKALPAPIEKTISKAKGQPREPQVYTLPPSREEMTKNQVSLTCLVKGFYPSDIAVEWESNGQPENNYKTTPPVLDSDGSFFLYSKLTVDKSRWQQGNVFSCSVMHEALHNHYTQKSLSLSPG

SEQ ID NO: 1481 - protein, 447 aa, Synthetic construct
QVQLVQSGSDLKKPGASVKVSCKASGYTFTSYTMNWVRQAPGQGLEWMGWINTNTGTPTYAQGFTGRFVFSLDTSVSTAYLQISSLKAEDTAVYYCTRYTGNYSFDYWGQGTLVTVSSASTKGPSVFPLAPSSKSTSGGTAALGCLVKDYFPEPVTVSWNSGALTSGVHTFPAVLQSSGLYSLSSVVTVPSSSLGTQTYICNVNHKPSNTKVDKRVEPKSCDKTHTCPPCPAPELLGGPSVFLFPPKPKDTLMISRTPEVTCVVVDVSHEDPEVKFNWYVDGVEVHNAKTKPREEQYASTYRVVSVLTVLHQDWLNGKEYKCKVSNKALPAPIEKTISKAKGQPREPQVYTLPPSREEMTKNQVSLTCLVKGFYPSDIAVEWESNGQPENNYKTTPPVLDSDGSFFLYSKLTVDKSRWQQGNVFSCSVMHEALHNHYTQKSLSLSPG

SEQ ID NO: 1482 - protein, 454 aa, Synthetic construct
EVQLVESGGVLVQPGGSLRLSCAASGFTFRSYAMSWVRQAPGKGLEWVSAISGSGDSTYFADSVKGRFTISRDNSKNTLSLQMNSLRAEDTAVYYCASILGYCSGTSCYGLFDNWGQGTLVTVSSASTKGPSVFPLAPSSKSTSGGTAALGCLVKDYFPEPVTVSWNSGALTSGVHTFPAVLQSSGLYSLSSVVTVPSSSLGTQTYICNVNHKPSNTKVDKRVEPKSCDKTHTCPPCPAPELLGGPSVFLFPPKPKDTLMISRTPEVTCVVVDVSHEDPEVKFNWYVDGVEVHNAKTKPREEQYASTYRVVSVLTVLHQDWLNGKEYKCKVSNKALPAPIEKTISKAKGQPREPQVYTLPPSREEMTKNQVSLTCLVKGFYPSDIAVEWESNGQPENNYKTTPPVLDSDGSFFLYSKLTVDKSRWQQGNVFSCSVMHEALHNHYTQKSLSLSPG

SEQ ID NO: 1483 - protein, 446 aa, Synthetic construct
QVQLQESGPGLVKPSGTLSLTCAVSGGSISNDNWWSWVRQSPGKGLEWIGKIYHSEFTNYNPSLRSRVTISVDKSKNQFSLELTSVTAADTAVYYCAREYQNYMDVWGKGTTVTVSSASTKGPSVFPLAPSSKSTSGGTAALGCLVKDYFPEPVTVSWNSGALTSGVHTFPAVLQSSGLYSLSSVVTVPSSSLGTQTYICNVNHKPSNTKVDKRVEPKSCDKTHTCPPCPAPELLGGPSVFLFPPKPKDTLMISRTPEVTCVVVDVSHEDPEVKFNWYVDGVEVHNAKTKPREEQYASTYRVVSVLTVLHQDWLNGKEYKCKVSNKALPAPIEKTISKAKGQPREPQVYTLPPSREEMTKNQVSLTCLVKGFYPSDIAVEWESNGQPENNYKTTPPVLDSDGSFFLYSKLTVDKSRWQQGNVFSCSVMHEALHNHYTQKSLSLSPG

SEQ ID NO: 1484 - protein, 450 aa, Synthetic construct
QVQLQESGPGLVKPSGTLSLTCVVSGDSISSNNWWSWVRQPPGKGLEWIGQIYHSGITNYNPSLKSRVTISVDKSKNQFSLELTSVTAADAAVYYCARAQWELRAGWFDPWGQGTLVTVSSASTKGPSVFPLAPSSKSTSGGTAALGCLVKDYFPEPVTVSWNSGALTSGVHTFPAVLQSSGLYSLSSVVTVPSSSLGTQTYICNVNHKPSNTKVDKRVEPKSCDKTHTCPPCPAPELLGGPSVFLFPPKPKDTLMISRTPEVTCVVVDVSHEDPEVKFNWYVDGVEVHNAKTKPREEQYASTYRVVSVLTVLHQDWLNGKEYKCKVSNKALPAPIEKTISKAKGQPREPQVYTLPPSREEMTKNQVSLTCLVKGFYPSDIAVEWESNGQPENNYKTTPPVLDSDGSFFLYSKLTVDKSRWQQGNVFSCSVMHEALHNHYTQKSLSLSPG

SEQ ID NO: 1485 - protein, 448 aa, Synthetic construct
EVQLVESGGGLVKPGGTLTLSCAASGFTFSNAWMSWVRQAPGKGLEWVGRIKSKTDGGTTDYAAPVKGRFTISRDDSKNTLYLQMNSLKTEDTAVYYCTPRYNSDFDYWGQGTLVTVSSASTKGPSVFPLAPSSKSTSGGTAALGCLVKDYFPEPVTVSWNSGALTSGVHTFPAVLQSSGLYSLSSVVTVPSSSLGTQTYICNVNHKPSNTKVDKRVEPKSCDKTHTCPPCPAPELLGGPSVFLFPPKPKDTLMISRTPEVTCVVVDVSHEDPEVKFNWYVDGVEVHNAKTKPREEQYASTYRVVSVLTVLHQDWLNGKEYKCKVSNKALPAPIEKTISKAKGQPREPQVYTLPPSREEMTKNQVSLTCLVKGFYPSDIAVEWESNGQPENNYKTTPPVLDSDGSFFLYSKLTVDKSRWQQGNVFSCSVMHEALHNHYTQKSLSLSPG

SEQ ID NO: 1486 - protein, 449 aa, Synthetic construct
QVQLQESGPGLVKPSETLSLTCTVSGGSISSYYWSWIRQPPGKGLEWIGYIYYSGFTKYNPSLKSRVTISVDTSKNQFSLKLSSVTAADTAVYYCATHPRGYNYGPFDYWGQGTLVTVSSASTKGPSVFPLAPSSKSTSGGTAALGCLVKDYFPEPVTVSWNSGALTSGVHTFPAVLQSSGLYSLSSVVTVPSSSLGTQTYICNVNHKPSNTKVDKRVEPKSCDKTHTCPPCPAPELLGGPSVFLFPPKPKDTLMISRTPEVTCVVVDVSHEDPEVKFNWYVDGVEVHNAKTKPREEQYASTYRVVSVLTVLHQDWLNGKEYKCKVSNKALPAPIEKTISKAKGQPREPQVYTLPPSREEMTKNQVSLTCLVKGFYPSDIAVEWESNGQPENNYKTTPPVLDSDGSFFLYSKLTVDKSRWQQGNVFSCSVMHEALHNHYTQKSLSLSPG

SEQ ID NO: 1487 - protein, 450 aa, Synthetic construct
QVQLQESGPGLVKPSETLSLTCTVSGGSVNSGRYYWSWIRQPPGKGLEWIGYIYSSGYTNYNPSLKSRVTMLLDTSKNQFSLKLNSVTAADTAVYYCARSRGYRYGPFDYWGQGTLVTVSSASTKGPSVFPLAPSSKSTSGGTAALGCLVKDYFPEPVTVSWNSGALTSGVHTFPAVLQSSGLYSLSSVVTVPSSSLGTQTYICNVNHKPSNTKVDKRVEPKSCDKTHTCPPCPAPELLGGPSVFLFPPKPKDTLMISRTPEVTCVVVDVSHEDPEVKFNWYVDGVEVHNAKTKPREEQYASTYRVVSVLTVLHQDWLNGKEYKCKVSNKALPAPIEKTISKAKGQPREPQVYTLPPSREEMTKNQVSLTCLVKGFYPSDIAVEWESNGQPENNYKTTPPVLDSDGSFFLYSKLTVDKSRWQQGNVFSCSVMHEALHNHYTQKSLSLSPG

SEQ ID NO: 1488 - protein, 445 aa, Synthetic construct
QVQLVQSGSELKKPGASVKVSCEASGYTFTSYAMNWVRQAPGQGLEWMGWINTNTGTPTYAQGFTGRFVFSLDTSVSTAYLQISSLKAEDTAVYYCASHSTSFDYWGQGTLVTVSSASTKGPSVFPLAPSSKSTSGGTAALGCLVKDYFPEPVTVSWNSGALTSGVHTFPAVLQSSGLYSLSSVVTVPSSSLGTQTYICNVNHKPSNTKVDKRVEPKSCDKTHTCPPCPAPELLGGPSVFLFPPKPKDTLMISRTPEVTCVVVDVSHEDPEVKFNWYVDGVEVHNAKTKPREEQYASTYRVVSVLTVLHQDWLNGKEYKCKVSNKALPAPIEKTISKAKGQPREPQVYTLPPSREEMTKNQVSLTCLVKGFYPSDIAVEWESNGQPENNYKTTPPVLDSDGSFFLYSKLTVDKSRWQQGNVFSCSVMHEALHNHYTQKSLSLSPG

SEQ ID NO: 1489 - protein, 448 aa, Synthetic construct
QVQLQQWGAGLVKPSETLSLTCAVHGGSFSDYYLTWIRQPPGKGLEWIGEINHSGSTNYNPSLKSRVTLSIDTSKNQFSLKLSSVTAADTAVYYCARGSEDYYYYMDVWGKGTTVTVSSASTKGPSVFPLAPSSKSTSGGTAALGCLVKDYFPEPVTVSWNSGALTSGVHTFPAVLQSSGLYSLSSVVTVPSSSLGTQTYICNVNHKPSNTKVDKRVEPKSCDKTHTCPPCPAPELLGGPSVFLFPPKPKDTLMISRTPEVTCVVVDVSHEDPEVKFNWYVDGVEVHNAKTKPREEQYASTYRVVSVLTVLHQDWLNGKEYKCKVSNKALPAPIEKTISKAKGQPREPQVYTLPPSREEMTKNQVSLTCLVKGFYPSDIAVEWESNGQPENNYKTTPPVLDSDGSFFLYSKLTVDKSRWQQGNVFSCSVMHEALHNHYTQKSLSLSPG

SEQ ID NO: 1490 - protein, 450 aa, Synthetic construct
EVQLVQSGAEVKKPGESLKISCKGSGYIFTSYWIGWVRQMPGKGLEWMGIIYPGDSDTRYSPSFQGQVTISADKSIITAYLQWSSLKASDTAMYYCARHDYFDIGGYFDYWGQGTLVTVSSASTKGPSVFPLAPSSKSTSGGTAALGCLVKDYFPEPVTVSWNSGALTSGVHTFPAVLQSSGLYSLSSVVTVPSSSLGTQTYICNVNHKPSNTKVDKRVEPKSCDKTHTCPPCPAPELLGGPSVFLFPPKPKDTLMISRTPEVTCVVVDVSHEDPEVKFNWYVDGVEVHNAKTKPREEQYASTYRVVSVLTVLHQDWLNGKEYKCKVSNKALPAPIEKTISKAKGQPREPQVYTLPPSREEMTKNQVSLTCLVKGFYPSDIAVEWESNGQPENNYKTTPPVLDSDGSFFLYSKLTVDKSRWQQGNVFSCSVMHEALHNHYTQKSLSLSPG

SEQ ID NO: 1491 - protein, 446 aa, Synthetic construct
QVQLVQSGAEVKKPGASVKVSCKADGYTFTDYYMHWVRQAPGQGHEWMGWINPNSGVTYYAQKFQGRVTMTRDTSISTAYMELNRLRSDDTAVYYCARDRTFYFDYWGQGTLVTVSSASTKGPSVFPLAPSSKSTSGGTAALGCLVKDYFPEPVTVSWNSGALTSGVHTFPAVLQSSGLYSLSSVVTVPSSSLGTQTYICNVNHKPSNTKVDKRVEPKSCDKTHTCPPCPAPELLGGPSVFLFPPKPKDTLMISRTPEVTCVVVDVSHEDPEVKFNWYVDGVEVHNAKTKPREEQYASTYRVVSVLTVLHQDWLNGKEYKCKVSNKALPAPIEKTISKAKGQPREPQVYTLPPSREEMTKNQVSLTCLVKGFYPSDIAVEWESNGQPENNYKTTPPVLDSDGSFFLYSKLTVDKSRWQQGNVFSCSVMHEALHNHYTQKSLSLSPG

SEQ ID NO: 1492 - protein, 455 aa, Synthetic construct
QVQLVQSGAEVKKPGASVKVSCKASGYTFTDYYMHWVRQAPGQGLEWMGWINPNNGGTDYAQKFQGRVTMTRDTSISTAYMELHRLRSDDTAVYFCARGVYDVVVPTAIVNWFDPWGQGTLVTVSSASTKGPSVFPLAPSSKSTSGGTAALGCLVKDYFPEPVTVSWNSGALTSGVHTFPAVLQSSGLYSLSSVVTVPSSSLGTQTYICNVNHKPSNTKVDKRVEPKSCDKTHTCPPCPAPELLGGPSVFLFPPKPKDTLMISRTPEVTCVVVDVSHEDPEVKFNWYVDGVEVHNAKTKPREEQYASTYRVVSVLTVLHQDWLNGKEYKCKVSNKALPAPIEKTISKAKGQPREPQVYTLPPSREEMTKNQVSLTCLVKGFYPSDIAVEWESNGQPENNYKTTPPVLDSDGSFFLYSKLTVDKSRWQQGNVFSCSVMHEALHNHYTQKSLSLSPG

SEQ ID NO: 1493 - protein, 449 aa, Synthetic construct
QVQLQESGPGLVKPSGTLSLTCAVSGDSISNDYWWNWVRQPPGKGLEWIGEIYHSGHTNYNPSLKSRVTISVDKSKNQLSLKLTSVNAADTAVYYCARGGTEITGYMDVWGKGTTVTVSSASTKGPSVFPLAPSSKSTSGGTAALGCLVKDYFPEPVTVSWNSGALTSGVHTFPAVLQSSGLYSLSSVVTVPSSSLGTQTYICNVNHKPSNTKVDKRVEPKSCDKTHTCPPCPAPELLGGPSVFLFPPKPKDTLMISRTPEVTCVVVDVSHEDPEVKFNWYVDGVEVHNAKTKPREEQYASTYRVVSVLTVLHQDWLNGKEYKCKVSNKALPAPIEKTISKAKGQPREPQVYTLPPSREEMTKNQVSLTCLVKGFYPSDIAVEWESNGQPENNYKTTPPVLDSDGSFFLYSKLTVDKSRWQQGNVFSCSVMHEALHNHYTQKSLSLSPG

SEQ ID NO: 1494 - protein, 450 aa, Synthetic construct
QVQLQESGPGLVKPSGTLSLTCAVSGASIRSGHWWSWVRQPPGKGLEWIGEIYHSGNTNYNPSLKSRVTLSVDKSKNQFSLKLSSVTAADTAVYYCARGHYGDYVVYFDYWGQGTLVTVSSASTKGPSVFPLAPSSKSTSGGTAALGCLVKDYFPEPVTVSWNSGALTSGVHTFPAVLQSSGLYSLSSVVTVPSSSLGTQTYICNVNHKPSNTKVDKRVEPKSCDKTHTCPPCPAPELLGGPSVFLFPPKPKDTLMISRTPEVTCVVVDVSHEDPEVKFNWYVDGVEVHNAKTKPREEQYASTYRVVSVLTVLHQDWLNGKEYKCKVSNKALPAPIEKTISKAKGQPREPQVYTLPPSREEMTKNQVSLTCLVKGFYPSDIAVEWESNGQPENNYKTTPPVLDSDGSFFLYSKLTVDKSRWQQGNVFSCSVMHEALHNHYTQKSLSLSPG

SEQ ID NO: 1495 - protein, 449 aa, Synthetic construct
QVQLQESGPGLVKPSETLSLTCTVSGGSISSYYWSWIRQPPGKGLEWIGYVYYSGYTKYNPSLKSRVTISIDASKNQFSLKLTSVTAADTAVYYCATVESKWNYGPFAIWGQGTMVTVSSASTKGPSVFPLAPSSKSTSGGTAALGCLVKDYFPEPVTVSWNSGALTSGVHTFPAVLQSSGLYSLSSVVTVPSSSLGTQTYICNVNHKPSNTKVDKRVEPKSCDKTHTCPPCPAPELLGGPSVFLFPPKPKDTLMISRTPEVTCVVVDVSHEDPEVKFNWYVDGVEVHNAKTKPREEQYASTYRVVSVLTVLHQDWLNGKEYKCKVSNKALPAPIEKTISKAKGQPREPQVYTLPPSREEMTKNQVSLTCLVKGFYPSDIAVEWESNGQPENNYKTTPPVLDSDGSFFLYSKLTVDKSRWQQGNVFSCSVMHEALHNHYTQKSLSLSPG

SEQ ID NO: 1496 - protein, 452 aa, Synthetic construct
QVQLVQSGAEVKKPGASVKVSCKASGYTFTGYYMNWVRQAPGQGLEWMGWINPNSGATNYAQKFQGRVTMTRDTSISTDYMELSRLRSDDTAVYYCARDGAKWNHEGYYFDYWGQGTLVTVSSASTKGPSVFPLAPSSKSTSGGTAALGCLVKDYFPEPVTVSWNSGALTSGVHTFPAVLQSSGLYSLSSVVTVPSSSLGTQTYICNVNHKPSNTKVDKRVEPKSCDKTHTCPPCPAPELLGGPSVFLFPPKPKDTLMISRTPEVTCVVVDVSHEDPEVKFNWYVDGVEVHNAKTKPREEQYASTYRVVSVLTVLHQDWLNGKEYKCKVSNKALPAPIEKTISKAKGQPREPQVYTLPPSREEMTKNQVSLTCLVKGFYPSDIAVEWESNGQPENNYKTTPPVLDSDGSFFLYSKLTVDKSRWQQGNVFSCSVMHEALHNHYTQKSLSLSPG

SEQ ID NO: 1497 - DNA, 660 bp, Synthetic construct; identical to SEQ ID NO: 575
  source 1..660: mol_type = other DNA

SEQ ID NO: 1498 - DNA, 660 bp, Synthetic construct; identical to SEQ ID NO: 575
  source 1..660: mol_type = other DNA

SEQ ID NO: 1499 - DNA, 660 bp, Synthetic construct; identical to SEQ ID NO: 575
  source 1..660: mol_type = other DNA

SEQ ID NO: 1500 - DNA, 660 bp, Synthetic construct; identical to SEQ ID NO: 575
  source 1..660: mol_type = other DNA

SEQ ID NO: 1501 - DNA, 660 bp, Synthetic construct; identical to SEQ ID NO: 575
  source 1..660: mol_type = other DNA

SEQ ID NO: 1502 - DNA, 660 bp, Synthetic construct; identical to SEQ ID NO: 575
  source 1..660: mol_type = other DNA

SEQ ID NO: 1503 - DNA, 660 bp, Synthetic construct; identical to SEQ ID NO: 575
  source 1..660: mol_type = other DNA

SEQ ID NO: 1504 - DNA, 660 bp, Synthetic construct; identical to SEQ ID NO: 575
  source 1..660: mol_type = other DNA

SEQ ID NO: 1505 - DNA, 660 bp, Synthetic construct; identical to SEQ ID NO: 575
  source 1..660: mol_type = other DNA

SEQ ID NO: 1506 - DNA, 660 bp, Synthetic construct; identical to SEQ ID NO: 575
  source 1..660: mol_type = other DNA

SEQ ID NO: 1507 - DNA, 660 bp, Synthetic construct; identical to SEQ ID NO: 575
  source 1..660: mol_type = other DNA

SEQ ID NO: 1508 - DNA, 660 bp, Synthetic construct; identical to SEQ ID NO: 575
  source 1..660: mol_type = other DNA

SEQ ID NO: 1509 - DNA, 660 bp, Synthetic construct; identical to SEQ ID NO: 575
  source 1..660: mol_type = other DNA

SEQ ID NO: 1510 - DNA, 660 bp, Synthetic construct; identical to SEQ ID NO: 575
  source 1..660: mol_type = other DNA

SEQ ID NO: 1511 - DNA, 660 bp, Synthetic construct; identical to SEQ ID NO: 575
  source 1..660: mol_type = other DNA

SEQ ID NO: 1512 - DNA, 660 bp, Synthetic construct; identical to SEQ ID NO: 575
  source 1..660: mol_type = other DNA

SEQ ID NO: 1513 - DNA, 660 bp, Synthetic construct; identical to SEQ ID NO: 575
  source 1..660: mol_type = other DNA

SEQ ID NO: 1514 - DNA, 660 bp, Synthetic construct; identical to SEQ ID NO: 575
  source 1..660: mol_type = other DNA

SEQ ID NO: 1515 - DNA, 660 bp, Synthetic construct; identical to SEQ ID NO: 575
  source 1..660: mol_type = other DNA

SEQ ID NO: 1516 - DNA, 642 bp, Synthetic construct; identical to SEQ ID NO: 479
  source 1..642: mol_type = other DNA

SEQ ID NO: 1517 - DNA, 642 bp, Synthetic construct; identical to SEQ ID NO: 479
  source 1..642: mol_type = other DNA

SEQ ID NO: 1518 - DNA, 642 bp, Synthetic construct; identical to SEQ ID NO: 479
  source 1..642: mol_type = other DNA

SEQ ID NO: 1519 - DNA, 642 bp, Synthetic construct; identical to SEQ ID NO: 479
  source 1..642: mol_type = other DNA

SEQ ID NO: 1520 - DNA, 642 bp, Synthetic construct; identical to SEQ ID NO: 479
  source 1..642: mol_type = other DNA

SEQ ID NO: 1521 - DNA, 642 bp, Synthetic construct; identical to SEQ ID NO: 479
  source 1..642: mol_type = other DNA

SEQ ID NO: 1522 - DNA, 642 bp, Synthetic construct; identical to SEQ ID NO: 479
  source 1..642: mol_type = other DNA

SEQ ID NO: 1523 - DNA, 642 bp, Synthetic construct; identical to SEQ ID NO: 479
  source 1..642: mol_type = other DNA

SEQ ID NO: 1524 - DNA, 642 bp, Synthetic construct; identical to SEQ ID NO: 479
  source 1..642: mol_type = other DNA

SEQ ID NO: 1525 - DNA, 642 bp, Synthetic construct; identical to SEQ ID NO: 479
  source 1..642: mol_type = other DNA

SEQ ID NO: 1526 - DNA, 642 bp, Synthetic construct; identical to SEQ ID NO: 479
  source 1..642: mol_type = other DNA

SEQ ID NO: 1527 - DNA, 642 bp, Synthetic construct
  source 1..642: mol_type = other DNA
gccatccagatgacccagtctccatcctccctgtctgcatctgtaggagacagagtcaccatcacttgccgggcaagtcagggcattagaaatgatttaggctggtatcagcagaaaccagggaaagcccctaagctcctgatctatgctgcatccagtttacaaagtggggtcccatcaaggttcagcggcagtggatctggcacagatttcactctcaccatcagcagcctgcagcctgaagattttgcaacttattactgtctacaagattacaattacccgtggacgttcggccaagggaccaaggtggaaatcaaacgtacggtagctgccccttcagtttttatctttccgccgtctgacgagcagttaaaatccgggaccgcttctgtagtttgcctgctgaataatttttatccgcgtgaggctaaagtacaatggaaagtcgacaatgctttgcagtcgggaaattcacaggaaagtgttacggagcaggattctaaagattccacatattcactcagctccacccttacactgagcaaagccgactatgaaaaacataaagtttacgcatgtgaggtgacgcaccaaggattatccagtccggtcacaaaatcgtttaaccgcggtgagtgt

SEQ ID NO: 1528 - DNA, 660 bp, Synthetic construct
  source 1..660: mol_type = other DNA
gacatcgtgatgacccagtctccagactccctggctgtgtctctgggcgagagggccaccatcaactgcaagtccagccagactgttttgtacaggtccaacaataagaactacttagcttggtatcagcagaaaccaggacagcctcctaagctgctcatttactgggcatctacccgggaatccggggtccctgaccgattcagtggcagcgggtctgggacagatttcactctcaccatcagcagcctgcaggctgaagatgtggcagtttattactgtcagcaatattatagtactccgtggacgttcggccaagggaccaaggtggaaatcaaacgtacggtagctgccccttcagtttttatctttccgccgtctgacgagcagttaaaatccgggaccgcttctgtagtttgcctgctgaataatttttatccgcgtgaggctaaagtacaatggaaagtcgacaatgctttgcagtcgggaaattcacaggaaagtgttacggagcaggattctaaagattccacatattcactcagctccacccttacactgagcaaagccgactatgaaaaacataaagtttacgcatgtgaggtgacgcaccaaggattatccagtccggtcacaaaatcgtttaaccgcggtgagtgt

SEQ ID NO: 1529 - DNA, 642 bp, Synthetic construct
  source 1..642: mol_type = other DNA
gccatccagatgacccagtctccatcctccctgtctgcttctgtaggagacagagtcaccatcacttgccgggcaagtcagggcattagaaatgatttaggctggtatcagcagaatcccgggaaagcccctaagctcctgatttatgctgcatccaatttacaaagtggggtcccatcaaggttcagcggcagtggatctggcacagatttcactctcaccatcagcagcctgcagcctgaagattttgttacttattactgtctacaagattacaattggccgtggacgttcggccaagggacacgactggagattaaacgtacggtagctgccccttcagtttttatctttccgccgtctgacgagcagttaaaatccgggaccgcttctgtagtttgcctgctgaataatttttatccgcgtgaggctaaagtacaatggaaagtcgacaatgctttgcagtcgggaaattcacaggaaagtgttacggagcaggattctaaagattccacatattcactcagctccacccttacactgagcaaagccgactatgaaaaacataaagtttacgcatgtgaggtgacgcaccaaggattatccagtccggtcacaaaatcgtttaaccgcggtgagtgt

SEQ ID NO: 1530 - DNA, 642 bp, Synthetic construct
  source 1..642: mol_type = other DNA
gacatccagatgacccagtctccatcctccctgtctgcatctgtaggagacagagtcaccatcacttgccgggcaagtcagagcattagcaactatttaaattggtatcaacagaaaccagagaaagcccctaagttcctgatctatgctgcatccagtttgcaaagtggggtcccatcaaggttcagtggcagtggatctgggacagatttcactctcaccatcagcagtctgcaacctgaagattttgcaacttactactgtcaacagagttacagttccccgctcactttcggcggagggaccaaggtggagatcaaacgtacggtagctgccccttcagtttttatctttccgccgtctgacgagcagttaaaatccgggaccgcttctgtagtttgcctgctgaataatttttatccgcgtgaggctaaagtacaatggaaagtcgacaatgctttgcagtcgggaaattcacaggaaagtgttacggagcaggattctaaagattccacatattcactcagctccacccttacactgagcaaagccgactatgaaaaacataaagtttacgcatgtgaggtgacgcaccaaggattatccagtccggtcacaaaatcgtttaaccgcggtgagtgt

SEQ ID NO: 1531 - DNA, 642 bp, Synthetic construct
  source 1..642: mol_type = other DNA
gaaattgtgttgactcagtctccagactttcagtctgtgactccaaaggagaaagtcaccatcacctgccgggccagtcagagcattggtagtaacttacactggttccagcagaaaccagatcagtctccaaaactcctcatcaagtatgcttcccagtccttctcaggggtcccctcgaggttcagtggcagtggatctgggacagatttcaccctcaccatcaatagcctggaagctgaagatgctgcaatgtattactgtcatcagagtagtagtttacctcggacgttcggccaagggaccaaggtggaaatcaaacgtacggtagctgccccttcagtttttatctttccgccgtctgacgagcagttaaaatccgggaccgcttctgtagtttgcctgctgaataatttttatccgcgtgaggctaaagtacaatggaaagtcgacaatgctttgcagtcgggaaattcacaggaaagtgttacggagcaggattctaaagattccacatattcactcagctccacccttacactgagcaaagccgactatgaaaaacataaagtttacgcatgtgaggtgacgcaccaaggattatccagtccggtcacaaaatcgtttaaccgcggtgagtgt

SEQ ID NO: 1532 - DNA, 642 bp, Synthetic construct
  source 1..642: mol_type = other DNA
gccatccagatgacccagtctccatcctccctgtctgcatctgtaggagacagagtcaccatcacttgccgggcaagtcagggcattagaaatgatttaggctggtatcagcagaaaccagggaaagcccctaagctcctgatctatgctgcatccagtttacaaagtggggtcccatcaaggttcagcggcagtggatctggcacagatttcactctcaccatcagcagcctgcagcctgaagattttgcatcttattactgtctacaagattacaattggccgtacacttttggccaggggaccaagctggagatcaaacgtacggtagctgccccttcagtttttatctttccgccgtctgacgagcagttaaaatccgggaccgcttctgtagtttgcctgctgaataatttttatccgcgtgaggctaaagtacaatggaaagtcgacaatgctttgcagtcgggaaattcacaggaaagtgttacggagcaggattctaaagattccacatattcactcagctccacccttacactgagcaaagccgactatgaaaaacataaagtttacgcatgtgaggtgacgcaccaaggattatccagtccggtcacaaaatcgtttaaccgcggtgagtgt

SEQ ID NO: 1533 - DNA, 645 bp, Synthetic construct
  source 1..645: mol_type = other DNA
gaaattgtgttgacgcagtctccaggcaccctgtctttgtctccaggggaaagagccaccctctcctgcagggccagtcagagtgttagaagcagctactttgcctggtaccagcagaaacctggccaggctcccaggctcctcatctatggtgcatccagcagggccactggcatcccagacaggttcagtggcagtgggtctgggacagacttcactctcaccatcagcagactggagcctgaagattttgcagtgtattactgtcagcagtatggtagctcacctcggacgttcggccaagggaccaaggtggaaatcaaacgtacggtagctgccccttcagtttttatctttccgccgtctgacgagcagttaaaatccgggaccgcttctgtagtttgcctgctgaataatttttatccgcgtgaggctaaagtacaatggaaagtcgacaatgctttgcagtcgggaaattcacaggaaagtgttacggagcaggattctaaagattccacatattcactcagctccacccttacactgagcaaagccgactatgaaaaacataaagtttacgcatgtgaggtgacgcaccaaggattatccagtccggtcacaaaatcgtttaaccgcggtgagtgt

SEQ ID NO: 1534 - DNA, 660 bp, Synthetic construct
  source 1..660: mol_type = other DNA
gacatcgtgatgacccagtctccagactccctggctgtgtctctgggcgagagggccaccatcaactgcaagtccagccagagtgttttatacagctccaacaataagaactacttagcttggtaccagcagaaaccaggacagcctcctaagctgctcatttactgggcatctacccgggaatccggggtccctgaccgattcagtggcagcgggtctgggacagatttcactctcaccatcagcagcctgcaggctgaagatgtggcagtttattactgtcagcaatattttggtactcctcggacgttcggccaagggaccaaggtggaaatcaaacgtacggtagctgccccttcagtttttatctttccgccgtctgacgagcagttaaaatccgggaccgcttctgtagtttgcctgctgaataatttttatccgcgtgaggctaaagtacaatggaaagtcgacaatgctttgcagtcgggaaattcacaggaaagtgttacggagcaggattctaaagattccacatattcactcagctccacccttacactgagcaaagccgactatgaaaaacataaagtttacgcatgtgaggtgacgcaccaaggattatccagtccggtcacaaaatcgtttaaccgcggtgagtgt

SEQ ID NO: 1535 - DNA, 642 bp, Synthetic construct
  source 1..642: mol_type = other DNA
gaaattgtgttgacacagtctccagccaccctgtctttgtctccaggggaaagagccaccctctcctgcagggccagtcagagtgttagcagctacttagcctggtaccaacagaaacctggccaggctcccaggctcctcatctatgatgcatccaacagggccactggcatcccagccaggttcagtggcagtgggtctgggacagacttcactctcaccatcagcagcctgcagtctgaagattttgcagtttattactgtcagcagcgtagcaattggccgctcactttcggcggagggaccaaggtggagatcaaacgtacggtagctgccccttcagtttttatctttccgccgtctgacgagcagttaaaatccgggaccgcttctgtagtttgcctgctgaataatttttatccgcgtgaggctaaagtacaatggaaagtcgacaatgctttgcagtcgggaaattcacaggaaagtgttacggagcaggattctaaagattccacatattcactcagctccacccttacactgagcaaagccgactatgaaaaacataaagtttacgcatgtgaggtgacgcaccaaggattatccagtccggtcacaaaatcgtttaaccgcggtgagtgt

SEQ ID NO: 1536 - DNA, 642 bp, Synthetic construct
  source 1..642: mol_type = other DNA
gacatccagatgacccagtctccatcctccctgtctgcatctgtaggagacagagtcaccatcacttgccgggcaagtcagaccattaggagctatttaaattggtatcagcagaaaccagggaaagcccctaagctcctgatctatgctgcatccagtttgcaaagtggggtcccatcaaggttcagtggcagtggatctgggacaaatttcactctcaccatcagcagtctgcaacctgaagattttgcaacttactcctgtcaacagagttacactaccccgctcactttcggcggagggaccaaggtggagatcaaacgtacggtagctgccccttcagtttttatctttccgccgtctgacgagcagttaaaatccgggaccgcttctgtagtttgcctgctgaataatttttatccgcgtgaggctaaagtacaatggaaagtcgacaatgctttgcagtcgggaaattcacaggaaagtgttacggagcaggattctaaagattccacatattcactcagctccacccttacactgagcaaagccgactatgaaaaacataaagtttacgcatgtgaggtgacgcaccaaggattatccagtccggtcacaaaatcgtttaaccgcggtgagtgt

SEQ ID NO: 1537 - DNA, 645 bp, Synthetic construct
  source 1..645: mol_type = other DNA
gaaattgtgttgacgcagtctccaggcaccctgtctttgtctccaggggaaagagccaccctctcctgcagggccagtcagagtattagcagcagctacttagcctggtaccagcgggaacctggccaggctcccaggctcctcatctatggtgcatccagcagggccactggcatcccagacaggttcagtggcagtgggtctgggacagacttcactctcaccatcagcagactggagcctgaagattttgtagtgtattactgtcaacaatatggtagctcaccgatcaccttcggccaagggacacgactggagattaaacgtacggtagctgccccttcagtttttatctttccgccgtctgacgagcagttaaaatccgggaccgcttctgtagtttgcctgctgaataatttttatccgcgtgaggctaaagtacaatggaaagtcgacaatgctttgcagtcgggaaattcacaggaaagtgttacggagcaggattctaaagattccacatattcactcagctccacccttacactgagcaaagccgactatgaaaaacataaagtttacgcatgtgaggtgacgcaccaaggattatccagtccggtcacaaaatcgtttaaccgcggtgagtgt

SEQ ID NO: 1538 - DNA, 645 bp, Synthetic construct
  source 1..645: mol_type = other DNA
gaaattgtgttgacgcagtctccaggcaccctgtctttgtctccaggggaaagagccaccctctcctgcagggccagtcagagtgttcgcagcagctacttagcctggtaccagcagaaacctggccaggctcccaggctcctcatctatggtgcatccagcagggccactggcatcccagacaggttcagtggcagtgggtctgggacagacttcactctcaccttcagcagactggagcctgaagattttgcagtgtattactgtcagcagtatggtagctcaccgtacacttttggccaggggaccaagctggagatcaaacgtacggtagctgccccttcagtttttatctttccgccgtctgacgagcagttaaaatccgggaccgcttctgtagtttgcctgctgaataatttttatccgcgtgaggctaaagtacaatggaaagtcgacaatgctttgcagtcgggaaattcacaggaaagtgttacggagcaggattctaaagattccacatattcactcagctccacccttacactgagcaaagccgactatgaaaaacataaagtttacgcatgtgaggtgacgcaccaaggattatccagtccggtcacaaaatcgtttaaccgcggtgagtgt

SEQ ID NO: 1539 - DNA, 642 bp, Synthetic construct
  source 1..642: mol_type = other DNA
gacatccagatgacccagtctccatcctccctgtctgcatctgtaggagacagagtcaccatcacttgccaggcgagtcaggacattagcaactatttaaattggtatcagcagaaaccagggaaagcccctaagctcctgatctacgatgcatccaatttggaaacaggggtcccatcaaggttcagtggaagtggatctgggacagattttactttcaccatcagcagcctgcagcctgaagattttgcaacttactattgtcaacaggctaacagtttcccgctcactttcggcggagggaccaaggtggagatcaaacgtacggtagctgccccttcagtttttatctttccgccgtctgacgagcagttaaaatccgggaccgcttctgtagtttgcctgctgaataatttttatccgcgtgaggctaaagtacaatggaaagtcgacaatgctttgcagtcgggaaattcacaggaaagtgttacggagcaggattctaaagattccacatattcactcagctccacccttacactgagcaaagccgactatgaaaaacataaagtttacgcatgtgaggtgacgcaccaaggattatccagtccggtcacaaaatcgtttaaccgcggtgagtgt

SEQ ID NO: 1540 - DNA, 645 bp, Synthetic construct
  source 1..645: mol_type = other DNA
gaaattgtgttgacgcagtctccaggcaccctgtctttgtctccaggggaaagagccaccctctcctgcagggccagtcagagtgttagcagcagctacttagcctggtaccagcagaaacctggccaggctcccaggctcctcatctatggtgcatccagcagggccactggcatcccagacaggttcagtggcagtgggtctgggacagacttcactctcaccatcagcagactggagcctgaagattttgcagtgtattactgtcagcagtatggtagctcaccattcactttcggccctgggaccaaagtggatatcaaacgtacggtagctgccccttcagtttttatctttccgccgtctgacgagcagttaaaatccgggaccgcttctgtagtttgcctgctgaataatttttatccgcgtgaggctaaagtacaatggaaagtcgacaatgctttgcagtcgggaaattcacaggaaagtgttacggagcaggattctaaagattccacatattcactcagctccacccttacactgagcaaagccgactatgaaaaacataaagtttacgcatgtgaggtgacgcaccaaggattatccagtccggtcacaaaatcgtttaaccgcggtgagtgt

SEQ ID NO: 1541 - DNA, 660 bp, Synthetic construct
  source 1..660: mol_type = other DNA
gacatcgtgatgacccagtctccagactccctggctgtgtctctgggcgagagggccaccatcaactgcaagtccagccagagtgttttatacagctccaacaataagaactacttagcttggtaccagcagaaaccaggacagcctcctaagctgctcatttactgggcatctacccgggaatccggggtccctgaccgattcagtggcagcgggtctgggacagatttcactctcaccatcagcagcctgcaggctgaagatgtggcagtttattactgtcagcaatattatagtactccgtggacgttcggccaagggacacgactggagattaaacgtacggtagctgccccttcagtttttatctttccgccgtctgacgagcagttaaaatccgggaccgcttctgtagtttgcctgctgaataatttttatccgcgtgaggctaaagtacaatggaaagtcgacaatgctttgcagtcgggaaattcacaggaaagtgttacggagcaggattctaaagattccacatattcactcagctccacccttacactgagcaaagccgactatgaaaaacataaagtttacgcatgtgaggtgacgcaccaaggattatccagtccggtcacaaaatcgtttaaccgcggtgagtgt

SEQ ID NO: 1542 - DNA, 639 bp, Synthetic construct
  source 1..639: mol_type = other DNA
gacatccagatgacccagtctccatcctccctgtctgcatctgtaggagacagagtcaccatcacttgccgggcgagtcaggacattagcaactatttaaattggtatcagcagaaaccagggaaagcccctaagctcctgatctatgctgcatccagtttggaaagtggggtcccatcaaggttcagtggcagtggatctgggacagatttcactctcaccatcagcagtctgcaacctgaagattttgcaacttactactgtcaacagagttacagtacccctactttcggcggagggaccaaggtggagatcaaacgtacggtagctgccccttcagtttttatctttccgccgtctgacgagcagttaaaatccgggaccgcttctgtagtttgcctgctgaataatttttatccgcgtgaggctaaagtacaatggaaagtcgacaatgctttgcagtcgggaaattcacaggaaagtgttacggagcaggattctaaagattccacatattcactcagctccacccttacactgagcaaagccgactatgaaaaacataaagtttacgcatgtgaggtgacgcaccaaggattatccagtccggtcacaaaatcgtttaaccgcggtgagtgt

SEQ ID NO: 1543 - DNA, 660 bp, Synthetic construct
  source 1..660: mol_type = other DNA
gacatcgtgatgacccagtctccagactccctggctgtgtctctgggcgagagggccaccatcaactgcaagtccagccagagtgttttatacaggtccaacaataagaactacttagcttggtaccagcagaaaccaggccagcctcctaaactgctcatttactgggcatctacccgggaatccggggtccctgaccgattcagtggcagcgggtctgggacagatttcactctcaccatcagcagcctgcaggctgaagatgtggcagtttattactgtcagcaatattatggtactcctcggacgttcggccaagggaccaaggtggaaatcaaacgtacggtagctgccccttcagtttttatctttccgccgtctgacgagcagttaaaatccgggaccgcttctgtagtttgcctgctgaataatttttatccgcgtgaggctaaagtacaatggaaagtcgacaatgctttgcagtcgggaaattcacaggaaagtgttacggagcaggattctaaagattccacatattcactcagctccacccttacactgagcaaagccgactatgaaaaacataaagtttacgcatgtgaggtgacgcaccaaggattatccagtccggtcacaaaatcgtttaaccgcggtgagtgt

SEQ ID NO: 1544 - DNA, 642 bp, Synthetic construct
  source 1..642: mol_type = other DNA
gacatccagatgacccagtctccatcctccctgtctgcatctgtaggagacagagtcaccatcacttgccaggcgagtcaggacattaagaactgtttaaattggtatcagcagaaaccagggaaagcccctaagctcctgatctacgatgcatccaatttggaaacaggggtcccatcaaggttcagtggaagtggatctgggacagattttactttcaccatcagcagcctgcagcctgaagatattgcaacatattactgtcaacagtttgataatctccctctcactttcggcggagggaccaaggtggagatcaaacgtacggtagctgccccttcagtttttatctttccgccgtctgacgagcagttaaaatccgggaccgcttctgtagtttgcctgctgaataatttttatccgcgtgaggctaaagtacaatggaaagtcgacaatgctttgcagtcgggaaattcacaggaaagtgttacggagcaggattctaaagattccacatattcactcagctccacccttacactgagcaaagccgactatgaaaaacataaagtttacgcatgtgaggtgacgcaccaaggattatccagtccggtcacaaaatcgtttaaccgcggtgagtgt

SEQ ID NO: 1545 - DNA, 657 bp, Synthetic construct
  source 1..657: mol_type = other DNA
gacatcgtgatgacccagtctccagactccctggctgtgtctctgggcgagagggccaccatcaactgcaagtccagccagactattttatacaggtccaacattaagaactacttagcttggtaccagcagaaaccaggacagcctcctaaactgctcatttcctgggcatctacccgggaatccggggtccctgaccgattcagtggcagcgggtctgggacagatttcactctcaccatcagcagcctgcaggctgaagatgtggcagtttattactgtcagcaatattatagtactcggacgttcggccaggggaccaagctggagatcaaacgtacggtagctgccccttcagtttttatctttccgccgtctgacgagcagttaaaatccgggaccgcttctgtagtttgcctgctgaataatttttatccgcgtgaggctaaagtacaatggaaagtcgacaatgctttgcagtcgggaaattcacaggaaagtgttacggagcaggattctaaagattccacatattcactcagctccacccttacactgagcaaagccgactatgaaaaacataaagtttacgcatgtgaggtgacgcaccaaggattatccagtccggtcacaaaatcgtttaaccgcggtgagtgt

SEQ ID NO: 1546 - DNA, 660 bp, Synthetic construct
  source 1..660: mol_type = other DNA
gacatcgtgatgacccagtctccagactccctggctgtgtctctgggcgagagggccaccatcaactgcaagtccagccagagtgttttatacagctccaacaataagaactacttagcttggtaccagcagaaaccaggacagcctcctaagctgctcatttactgggcatctacccgggaatccggggtccctgaccgattcagtggcagcgggtctgggacagatttcactctcaccatcagcagcctgcaggctgaagatgtggcagtttattactgtcagcaatattatagtactcctcggacgttcggccaagggaccaaggtggaaatcaaacgtacggtagctgccccttcagtttttatctttccgccgtctgacgagcagttaaaatccgggaccgcttctgtagtttgcctgctgaataatttttatccgcgtgaggctaaagtacaatggaaagtcgacaatgctttgcagtcgggaaattcacaggaaagtgttacggagcaggattctaaagattccacatattcactcagctccacccttacactgagcaaagccgactatgaaaaacataaagtttacgcatgtgaggtgacgcaccaaggattatccagtccggtcacaaaatcgtttaaccgcggtgagtgt

SEQ ID NO: 1547 - DNA, 642 bp, Synthetic construct
  source 1..642: mol_type = other DNA
gacatccagatgacccagtctccttccaccctgtctgcatctgtaggagacagagtcactatcacttgtcgggcgagtcagggtattagcagctggttagcctggtatcagcagaaaccagggaaagcccctaaactcctgatctatgctgcatccagtttgcagagtggggtcccatcaaggttcagcggcagtggatctgggacagatttcactctcaccatcagcagcctgcagcctgaagattttgcaacttactattgtcaacaggctaacagtttccctctcactttcggcggagggaccaaggtggagatcaaacgtacggtagctgccccttcagtttttatctttccgccgtctgacgagcagttaaaatccgggaccgcttctgtagtttgcctgctgaataatttttatccgcgtgaggctaaagtacaatggaaagtcgacaatgctttgcagtcgggaaattcacaggaaagtgttacggagcaggattctaaagattccacatattcactcagctccacccttacactgagcaaagccgactatgaaaaacataaagtttacgcatgtgaggtgacgcaccaaggattatccagtccggtcacaaaatcgtttaaccgcggtgagtgt

SEQ ID NO: 1548 - DNA, 660 bp, Synthetic construct
  source 1..660: mol_type = other DNA
gacatcgtgatgacccagtctccagactccctggctgtgtctctgggcgagagggccaccatcaactgcaagtccagccagagtgttttatacagctccaacaataagaactacttagcttggtaccagcagaaaccaggacagcctcctaagctgctcatttactgggcatctacccgggaatccggggtccctgaccgattcagtggcagcgggtctgggacagatttcactctcaccatcagcagcctgcaggctgaagatgtggcagtttattactgtcagcaatattatagtactcctccgacgttcggccaagggaccaaggtggaaatcaaacgtacggtagctgccccttcagtttttatctttccgccgtctgacgagcagttaaaatccgggaccgcttctgtagtttgcctgctgaataatttttatccgcgtgaggctaaagtacaatggaaagtcgacaatgctttgcagtcgggaaattcacaggaaagtgttacggagcaggattctaaagattccacatattcactcagctccacccttacactgagcaaagccgactatgaaaaacataaagtttacgcatgtgaggtgacgcaccaaggattatccagtccggtcacaaaatcgtttaaccgcggtgagtgt

SEQ ID NO: 1549 - DNA, 642 bp, Synthetic construct
  source 1..642: mol_type = other DNA
gacatccagatgacccagtctccatcctccctgtctgcatctgtaggagacagagtcaccatcacttgccgggcaagtcagagcattagcagctatttaaattggtatcagcagaaaccagggaaagcccctaagctcctgatctatgctgcatccagtttgcaaagtggggtcccatcaaggttcagtggcagtggatctgggacagatttcactctcaccatcagcagtctgcaacctgaagattttgcaacttactactgtcaacagagttacagtaccccgtacacttttggccaggggaccaagctggagatcaaacgtacggtagctgccccttcagtttttatctttccgccgtctgacgagcagttaaaatccgggaccgcttctgtagtttgcctgctgaataatttttatccgcgtgaggctaaagtacaatggaaagtcgacaatgctttgcagtcgggaaattcacaggaaagtgttacggagcaggattctaaagattccacatattcactcagctccacccttacactgagcaaagccgactatgaaaaacataaagtttacgcatgtgaggtgacgcaccaaggattatccagtccggtcacaaaatcgtttaaccgcggtgagtgt

SEQ ID NO: 1550 - DNA, 660 bp, Synthetic construct
  source 1..660: mol_type = other DNA
gacatcgtgatgacccagtctccagactccctggctgtgtctctgggcgagagggccaccatcaactgcaagtccagccagagtgttttatacagctccaacaataagaactacttagcttggtaccagcagaaaccaggacagcctcctaagctgctcatttactgggcatctacccgggaatccggggtccctgaccgattcagtggcagcgggtctgggacagatttcactctcaccatcagcagcctgcaggctgaagatgtggcagtttattactgtcagcaattttatgatactcctcggacgttcggccaagggaccaaggtggaaatcaaacgtacggtagctgccccttcagtttttatctttccgccgtctgacgagcagttaaaatccgggaccgcttctgtagtttgcctgctgaataatttttatccgcgtgaggctaaagtacaatggaaagtcgacaatgctttgcagtcgggaaattcacaggaaagtgttacggagcaggattctaaagattccacatattcactcagctccacccttacactgagcaaagccgactatgaaaaacataaagtttacgcatgtgaggtgacgcaccaaggattatccagtccggtcacaaaatcgtttaaccgcggtgagtgt

SEQ ID NO: 1551 - DNA, 642 bp, Synthetic construct
  source 1..642: mol_type = other DNA
gacatccagatgacccagtctccatcctccctgtctgcatctgtaggagacagagtcaccatcacttgccgggcgagtcagggcattagcaattatttagcctggtatcagcagaaaccagggaaagttcctaagctcctgatctatgttgcatccactttgcaatcaggggtcccatctcggttcagtggcagtggatctgggacagatttcactctcaccatcagcagcctgcagcctgaagatgttgcaacttattactgtcaaaattatatcagtgccccgctcactttcggcggagggaccaaggtggagatcaaacgtacggtagctgccccttcagtttttatctttccgccgtctgacgagcagttaaaatccgggaccgcttctgtagtttgcctgctgaataatttttatccgcgtgaggctaaagtacaatggaaagtcgacaatgctttgcagtcgggaaattcacaggaaagtgttacggagcaggattctaaagattccacatattcactcagctccacccttacactgagcaaagccgactatgaaaaacataaagtttacgcatgtgaggtgacgcaccaaggattatccagtccggtcacaaaatcgtttaaccgcggtgagtgt

SEQ ID NO: 1552 - DNA, 660 bp, Synthetic construct
  source 1..660: mol_type = other DNA
gacatcgtgatgacccagtctccagactccctggctgtgtctctgggcgagagggccaccatcaactgcaagtccagccagagtgttttatacagctccaacaataagaactacttagcttggtaccagcagaaaccaggacagcctcctaagctgctcatttactgggcatctacccgggaatccggggtccctgaccgattcagtggcagcgggtctgggacagatttcactctcaccatcagcagcctgcaggctgaagatgtggcagtttattactgtcagcaatattatagtactccgtggacgttcggccaagggaccaaggtggaaatcaaacgtacggtagctgccccttcagtttttatctttccgccgtctgacgagcagttaaaatccgggaccgcttctgtagtttgcctgctgaataatttttatccgcgtgaggctaaagtacaatggaaagtcgacaatgctttgcagtcgggaaattcacaggaaagtgttacggagcaggattctaaagattccacatattcactcagctccacccttacactgagcaaagccgactatgaaaaacataaagtttacgcatgtgaggtgacgcaccaaggattatccagtccggtcacaaaatcgtttaaccgcggtgagtgt

SEQ ID NO: 1553 - DNA, 645 bp, Synthetic construct
  source 1..645: mol_type = other DNA
gaaattgtgttgacgcagtctccaggcaccctgtctttgtctccaggggaaagagccaccctctcctgcagggccagtcagagtgttagcagcagctacttagcctggtaccagcagaaacctggccaggctcccaggctcctcatctatggtgcatccagcagggccactggcatcccagacaggttcagtggcagtgggtctgggacagacttcactctcaccatcagcagactggagcctgaagattttgcagtgtattactgtcagcagtatggtagctcaccgtacacttttggccaggggaccaagctggagatcaaacgtacggtagctgccccttcagtttttatctttccgccgtctgacgagcagttaaaatccgggaccgcttctgtagtttgcctgctgaataatttttatccgcgtgaggctaaagtacaatggaaagtcgacaatgctttgcagtcgggaaattcacaggaaagtgttacggagcaggattctaaagattccacatattcactcagctccacccttacactgagcaaagccgactatgaaaaacataaagtttacgcatgtgaggtgacgcaccaaggattatccagtccggtcacaaaatcgtttaaccgcggtgagtgt

SEQ ID NO: 1554 - DNA, 642 bp, Synthetic construct
  source 1..642: mol_type = other DNA
gacatccagatgacccagtctccatcctccctgtctgcatctgtaggagacagagtcaacatcacttgccgggcgagtcagggcattagcaattatttagcctggtatcagcagaaaccagggaaagttcctaagctcctgatctatgctgcatccactttgcaatcaggggtcccatctcgtttcagtggcagtggatctgggacagatttcactctcaccatcagcagcctgcagcctgaagatgttgcaagttatttctgtcaaaaatatatcagtgccccgctcactttcggcggagggaccaaggtggagatcaaacgtacggtagctgccccttcagtttttatctttccgccgtctgacgagcagttaaaatccgggaccgcttctgtagtttgcctgctgaataatttttatccgcgtgaggctaaagtacaatggaaagtcgacaatgctttgcagtcgggaaattcacaggaaagtgttacggagcaggattctaaagattccacatattcactcagctccacccttacactgagcaaagccgactatgaaaaacataaagtttacgcatgtgaggtgacgcaccaaggattatccagtccggtcacaaaatcgtttaaccgcggtgagtgt

SEQ ID NO: 1555 - DNA, 642 bp, Synthetic construct
  source 1..642: mol_type = other DNA
gacatccagatgacccagtctccatcctccctgtctgcatctgtaggagacagagtcaccatcacttgccgggcgagtcagggcattagcaattatttagcctggtatcagcagaaaccagggaaagttcctaagctcctgatctatgctgcatccactttgcaatcaggggtcccatctcggttcagtggcagtggatctgggacagatttcactctcaccatcagcagcctgcagcctgaagacgttgcaagttattactgtcaagattataccagtgccccgctcactttcggcggagggaccaaggtggagatcaaacgtacggtagctgccccttcagtttttatctttccgccgtctgacgagcagttaaaatccgggaccgcttctgtagtttgcctgctgaataatttttatccgcgtgaggctaaagtacaatggaaagtcgacaatgctttgcagtcgggaaattcacaggaaagtgttacggagcaggattctaaagattccacatattcactcagctccacccttacactgagcaaagccgactatgaaaaacataaagtttacgcatgtgaggtgacgcaccaaggattatccagtccggtcacaaaatcgtttaaccgcggtgagtgt

SEQ ID NO: 1556 - DNA, 645 bp, Synthetic construct
  source 1..645: mol_type = other DNA
gaaattgtgttgacgcagtctccaggcaccctgtctttgtctccaggggaaagagccaccctctcctgcagggccagtcagagtgttagtgacagctacttagcctggtaccagcaggaacctggccaggcgcccaggctcctcatctatggtgcatccagcagggccactggcatcccagacaggttcagtggcagtgggtctgggacagacttcactctcaccatcagcagactggagcctgaagattttgcattatattactgtcagcaatatgattcctcgccattcactttcggccctgggaccaaagtggatatcaaacgtacggtagctgccccttcagtttttatctttccgccgtctgacgagcagttaaaatccgggaccgcttctgtagtttgcctgctgaataatttttatccgcgtgaggctaaagtacaatggaaagtcgacaatgctttgcagtcgggaaattcacaggaaagtgttacggagcaggattctaaagattccacatattcactcagctccacccttacactgagcaaagccgactatgaaaaacataaagtttacgcatgtgaggtgacgcaccaaggattatccagtccggtcacaaaatcgtttaaccgcggtgagtgt

SEQ ID NO: 1557 - DNA, 660 bp, Synthetic construct; identical to SEQ ID NO: 574
  source 1..660: mol_type = other DNA

SEQ ID NO: 1558 - DNA, 660 bp, Synthetic construct; identical to SEQ ID NO: 575
  source 1..660: mol_type = other DNA

SEQ ID NO: 1559 - DNA, 660 bp, Synthetic construct; identical to SEQ ID NO: 575
  source 1..660: mol_type = other DNA

SEQ ID NO: 1560 - DNA, 660 bp, Synthetic construct; identical to SEQ ID NO: 575
  source 1..660: mol_type = other DNA

SEQ ID NO: 1561 - DNA, 660 bp, Synthetic construct; identical to SEQ ID NO: 575
  source 1..660: mol_type = other DNA

SEQ ID NO: 1562 - DNA, 642 bp, Synthetic construct
  source 1..642: mol_type = other DNA
gacatccagatgacccagtctccatcctccctgtctgcatctgtaggagacagagtcaccatcacctgccgggcaagtcagaccattagaaactttttaaattggtatcagcggaaaccagggaaagcccctaagatcctgatctatgctgcatccagtttgcaaagtggggtcccatcaaggttcagtggcagtggatctgggacagatttcactctcaccatcagcagtctgcaacctgcagattttgcaacttactactgtcaacagacttacagtatcccgatcaccttcggccaagggacacgactggagattaaacgtacggtagctgccccttcagtttttatctttccgccgtctgacgagcagttaaaatccgggaccgcttctgtagtttgcctgctgaataatttttatccgcgtgaggctaaagtacaatggaaagtcgacaatgctttgcagtcgggaaattcacaggaaagtgttacggagcaggattctaaagattccacatattcactcagctccacccttacactgagcaaagccgactatgaaaaacataaagtttacgcatgtgaggtgacgcaccaaggattatccagtccggtcacaaaatcgtttaaccgcggtgagtgt

SEQ ID NO: 1563 - DNA, 642 bp, Synthetic construct
  source 1..642: mol_type = other DNA
gacatccagatgacccagtctccatcctccctgtctgcatctgtaggagacagagtcaccatcacttgccgggcaagtcagagcattagcaggtatttaaattggtatcagcagaaaccagggaaagcccctaaactcctgctctatgctgcatccagtttgcaaagtggggtcccatcaaagttcagcggcagtggatctgggacagatttcactctcaccatcagcagcctgcaacctgaagattttgcaacttactactgtcaacagagttacagttccccgatcaccttcggccaagggacacgactggagattaaacgtacggtagctgccccttcagtttttatctttccgccgtctgacgagcagttaaaatccgggaccgcttctgtagtttgcctgctgaataatttttatccgcgtgaggctaaagtacaatggaaagtcgacaatgctttgcagtcgggaaattcacaggaaagtgttacggagcaggattctaaagattccacatattcactcagctccacccttacactgagcaaagccgactatgaaaaacataaagtttacgcatgtgaggtgacgcaccaaggattatccagtccggtcacaaaatcgtttaaccgcggtgagtgt

SEQ ID NO: 1564 - DNA, 657 bp, Synthetic construct
  source 1..657: mol_type = other DNA
gatattgtgatgactcagtctccactctccctgcccgtcacccctggagagccggcctccatctcctgcaggtctagtcagagcctcctgcatagtaatggatacaactatttggattggtacctgcagaagccagggcagtctccacagctcctgatctatttgggttctaatcgggcctccggggtccctgacaggttcagtggcagtggatcaggcacagattttacactgaaaatcagcagagtggaggctgaggatgttggggtttattactgcatgcaaactctacaaactcctccgacgttcggccaagggaccaaggtggaaatcaaacgtacggtagctgccccttcagtttttatctttccgccgtctgacgagcagttaaaatccgggaccgcttctgtagtttgcctgctgaataatttttatccgcgtgaggctaaagtacaatggaaagtcgacaatgctttgcagtcgggaaattcacaggaaagtgttacggagcaggattctaaagattccacatattcactcagctccacccttacactgagcaaagccgactatgaaaaacataaagtttacgcatgtgaggtgacgcaccaaggattatccagtccggtcacaaaatcgtttaaccgcggtgagtgt

SEQ ID NO: 1565 - DNA, 642 bp, Synthetic construct
  source 1..642: mol_type = other DNA
gacatccagttgacccagtctccatccttcctgtctgcatctgtaggagacagactcaccatcacttgccgggccagtcagggcattagcagttatttagcctggtatcagcaaaaaccagggaaagcccctaagctcctgatctatactgcatccactttacaaagtggggtcccatcaaggttcagcggcagtggatctgggacagaattcactctcacaatcagcagcctgcagcctgaagattttgcaacttattactgtcaacagcttaatggttaccctccgacgttcggccaagggaccaaggtggaaatcaaacgtacggtagctgccccttcagtttttatctttccgccgtctgacgagcagttaaaatccgggaccgcttctgtagtttgcctgctgaataatttttatccgcgtgaggctaaagtacaatggaaagtcgacaatgctttgcagtcgggaaattcacaggaaagtgttacggagcaggattctaaagattccacatattcactcagctccacccttacactgagcaaagccgactatgaaaaacataaagtttacgcatgtgaggtgacgcaccaaggattatccagtccggtcacaaaatcgtttaaccgcggtgagtgt

SEQ ID NO: 1566 - DNA, 642 bp, Synthetic construct
  source 1..642: mol_type = other DNA
gacatccagatgacccagtctccatcctccctgtctgcatctgtaggagacagagtcaccatcacttgccgggcaagtcagagcattaccagctatttaaattggtatcagcagaaaccagggaaagcccctaagctcctgatctttgctgcatccagtttgcaaagtggggtcccatcaaggttcagtggcagtggatctgggacagatttcactctcaccatcagcagtctgcaacctgaagattttgcaacttactactgtcaacagagttacagtacccctctcactttcggcggagggaccaaggtggagatcaaacgtacggtagctgccccttcagtttttatctttccgccgtctgacgagcagttaaaatccgggaccgcttctgtagtttgcctgctgaataatttttatccgcgtgaggctaaagtacaatggaaagtcgacaatgctttgcagtcgggaaattcacaggaaagtgttacggagcaggattctaaagattccacatattcactcagctccacccttacactgagcaaagccgactatgaaaaacataaagtttacgcatgtgaggtgacgcaccaaggattatccagtccggtcacaaaatcgtttaaccgcggtgagtgt

SEQ ID NO: 1567 - DNA, 660 bp, Synthetic construct
  source 1..660: mol_type = other DNA
gacatcgtgatgacccagtctccagactccctggctgtgtctctgggcgagagggccaccatcaactgcaagtccagccagagtgttttatacagctccaacaataagaactacttagcttggtaccagcagaaaccaggacagcctcctaagctgctcatttactgggcatctacccgggaatccggggtccctgaccgattcagtggcagcgggtctgggacagatttcactctcaccatcagcagcctgcaggctgaagatgtggcagtttattactgtcagcaatattatagtactcctcggacgttcggccaggggaccaaggtggaaatcaaacgtacggtagctgccccttcagtttttatctttccgccgtctgacgagcagttaaaatccgggaccgcttctgtagtttgcctgctgaataatttttatccgcgtgaggctaaagtacaatggaaagtcgacaatgctttgcagtcgggaaattcacaggaaagtgttacggagcaggattctaaagattccacatattcactcagctccacccttacactgagcaaagccgactatgaaaaacataaagtttacgcatgtgaggtgacgcaccaaggattatccagtccggtcacaaaatcgtttaaccgcggtgagtgt

SEQ ID NO: 1568 - DNA, 642 bp, Synthetic construct
  source 1..642: mol_type = other DNA
gacatccagatgacccagtctccatcctccctgtctgcatctgtaggagaaagagtcaccatcacttgccgggcaagtcagagcattagcagctatttaaattggtatcagcagaaaccagggaaagcccctaacctcctgatctatgctgcatccagtttccaaagtggggtcccatcaagggtcagtggcagtggatctgggacagatttcactctcaccatcagcagtctgcaacctgaggattttgcaacttactactgtcaacagagttacagtaacccgtacacttttggccaggggaccaagctggagatcaaacgtacggtagctgccccttcagtttttatctttccgccgtctgacgagcagttaaaatccgggaccgcttctgtagtttgcctgctgaataatttttatccgcgtgaggctaaagtacaatggaaagtcgacaatgctttgcagtcgggaaattcacaggaaagtgttacggagcaggattctaaagattccacatattcactcagctccacccttacactgagcaaagccgactatgaaaaacataaagtttacgcatgtgaggtgacgcaccaaggattatccagtccggtcacaaaatcgtttaaccgcggtgagtgt

SEQ ID NO: 1569 - DNA, 645 bp, Synthetic construct
  source 1..645: mol_type = other DNA
gaaattgtgttgacgcagtctccaggcaccctgtctttgtctccaggggaaagagccaccctctcctgcagggccagtcagagtgttagtagaagctacttagcctggtaccagcagaaacctggccaggctcccaggctcctcatctatggtgcatccagcagggccactggcatcccagacaggttcagtggcagtgggtctgggacagacttcactctcaccatcagcagactggagcctgaagattttgcagtgtattactgtcagcagtatggtagctcaccgtggacgttcggccaagggaccaaggtggaaatcaaacgtacggtagctgccccttcagtttttatctttccgccgtctgacgagcagttaaaatccgggaccgcttctgtagtttgcctgctgaataatttttatccgcgtgaggctaaagtacaatggaaagtcgacaatgctttgcagtcgggaaattcacaggaaagtgttacggagcaggattctaaagattccacatattcactcagctccacccttacactgagcaaagccgactatgaaaaacataaagtttacgcatgtgaggtgacgcaccaaggattatccagtccggtcacaaaatcgtttaaccgcggtgagtgt

SEQ ID NO: 1570 - DNA, 657 bp, Synthetic construct
  source 1..657: mol_type = other DNA
gatattgtgatgactcagtctccactctccctgcccgtcacccctggagagccggcctccatctcctgcaggtctagtcagatcctcctgcatactaatggatacaactatttggattggtacctgcagaagccagggcagtctcctcagctcctgatctatttgggttcttatcgggcctccggggtccctgacaggttcagtggcagtggatcaggcacagattttacactgaaaatcagcagagtggaggctggggatgttgggctttattactgcatgcaagctctacaaactccgctcactttcggcggagggaccaaggtggagatcaaacgtacggtagctgccccttcagtttttatctttccgccgtctgacgagcagttaaaatccgggaccgcttctgtagtttgcctgctgaataatttttatccgcgtgaggctaaagtacaatggaaagtcgacaatgctttgcagtcgggaaattcacaggaaagtgttacggagcaggattctaaagattccacatattcactcagctccacccttacactgagcaaagccgactatgaaaaacataaagtttacgcatgtgaggtgacgcaccaaggattatccagtccggtcacaaaatcgtttaaccgcggtgagtgt

SEQ ID NO: 1571 - protein, 220 aa, Synthetic construct; identical to SEQ ID NO: 562

SEQ ID NO: 1572 - protein, 220 aa, Synthetic construct; identical to SEQ ID NO: 562

SEQ ID NO: 1573 - protein, 220 aa, Synthetic construct; identical to SEQ ID NO: 562

SEQ ID NO: 1574 - protein, 220 aa, Synthetic construct; identical to SEQ ID NO: 562

SEQ ID NO: 1575 - protein, 220 aa, Synthetic construct; identical to SEQ ID NO: 562

SEQ ID NO: 1576 - protein, 220 aa, Synthetic construct; identical to SEQ ID NO: 562

SEQ ID NO: 1577 - protein, 220 aa, Synthetic construct; identical to SEQ ID NO: 562

SEQ ID NO: 1578 - protein, 220 aa, Synthetic construct; identical to SEQ ID NO: 562

SEQ ID NO: 1579 - protein, 220 aa, Synthetic construct; identical to SEQ ID NO: 562

SEQ ID NO: 1580 - protein, 220 aa, Synthetic construct; identical to SEQ ID NO: 562

SEQ ID NO: 1581 - protein, 220 aa, Synthetic construct; identical to SEQ ID NO: 562

SEQ ID NO: 1582 - protein, 220 aa, Synthetic construct; identical to SEQ ID NO: 562

SEQ ID NO: 1583 - protein, 220 aa, Synthetic construct; identical to SEQ ID NO: 562

SEQ ID NO: 1584 - protein, 220 aa, Synthetic construct; identical to SEQ ID NO: 562

SEQ ID NO: 1585 - protein, 220 aa, Synthetic construct; identical to SEQ ID NO: 562

SEQ ID NO: 1586 - protein, 220 aa, Synthetic construct; identical to SEQ ID NO: 562

SEQ ID NO: 1587 - protein, 220 aa, Synthetic construct; identical to SEQ ID NO: 562

SEQ ID NO: 1588 - protein, 220 aa, Synthetic construct; identical to SEQ ID NO: 562

SEQ ID NO: 1589 - protein, 220 aa, Synthetic construct; identical to SEQ ID NO: 562

SEQ ID NO: 1590 - protein, 214 aa, Synthetic construct; identical to SEQ ID NO: 469

SEQ ID NO: 1591 - protein, 214 aa, Synthetic construct; identical to SEQ ID NO: 469

SEQ ID NO: 1592 - protein, 214 aa, Synthetic construct; identical to SEQ ID NO: 469

SEQ ID NO: 1593 - protein, 214 aa, Synthetic construct; identical to SEQ ID NO: 469

SEQ ID NO: 1594 - protein, 214 aa, Synthetic construct; identical to SEQ ID NO: 469

SEQ ID NO: 1595 - protein, 214 aa, Synthetic construct; identical to SEQ ID NO: 469

SEQ ID NO: 1596 - protein, 214 aa, Synthetic construct; identical to SEQ ID NO: 469

SEQ ID NO: 1597 - protein, 214 aa, Synthetic construct; identical to SEQ ID NO: 469

SEQ ID NO: 1598 - protein, 214 aa, Synthetic construct; identical to SEQ ID NO: 469

SEQ ID NO: 1599 - protein, 214 aa, Synthetic construct; identical to SEQ ID NO: 469

SEQ ID NO: 1600 - protein, 214 aa, Synthetic construct; identical to SEQ ID NO: 469

SEQ ID NO: 1601 - protein, 214 aa, Synthetic construct
AIQMTQSPSSLSASVGDRVTITCRASQGIRNDLGWYQQKPGKAPKLLIYAASSLQSGVPSRFSGSGSGTDFTLTISSLQPEDFATYYCLQDYNYPWTFGQGTKVEIKRTVAAPSVFIFPPSDEQLKSGTASVVCLLNNFYPREAKVQWKVDNALQSGNSQESVTEQDSKDSTYSLSSTLTLSKADYEKHKVYACEVTHQGLSSPVTKSFNRGEC

SEQ ID NO: 1602 - protein, 220 aa, Synthetic construct
DIVMTQSPDSLAVSLGERATINCKSSQTVLYRSNNKNYLAWYQQKPGQPPKLLIYWASTRESGVPDRFSGSGSGTDFTLTISSLQAEDVAVYYCQQYYSTPWTFGQGTKVEIKRTVAAPSVFIFPPSDEQLKSGTASVVCLLNNFYPREAKVQWKVDNALQSGNSQESVTEQDSKDSTYSLSSTLTLSKADYEKHKVYACEVTHQGLSSPVTKSFNRGEC

SEQ ID NO: 1603 - protein, 214 aa, Synthetic construct
AIQMTQSPSSLSASVGDRVTITCRASQGIRNDLGWYQQNPGKAPKLLIYAASNLQSGVPSRFSGSGSGTDFTLTISSLQPEDFVTYYCLQDYNWPWTFGQGTRLEIKRTVAAPSVFIFPPSDEQLKSGTASVVCLLNNFYPREAKVQWKVDNALQSGNSQESVTEQDSKDSTYSLSSTLTLSKADYEKHKVYACEVTHQGLSSPVTKSFNRGEC

SEQ ID NO: 1604 - protein, 214 aa, Synthetic construct
DIQMTQSPSSLSASVGDRVTITCRASQSISNYLNWYQQKPEKAPKFLIYAASSLQSGVPSRFSGSGSGTDFTLTISSLQPEDFATYYCQQSYSSPLTFGGGTKVEIKRTVAAPSVFIFPPSDEQLKSGTASVVCLLNNFYPREAKVQWKVDNALQSGNSQESVTEQDSKDSTYSLSSTLTLSKADYEKHKVYACEVTHQGLSSPVTKSFNRGEC

SEQ ID NO: 1605 - protein, 214 aa, Synthetic construct
EIVLTQSPDFQSVTPKEKVTITCRASQSIGSNLHWFQQKPDQSPKLLIKYASQSFSGVPSRFSGSGSGTDFTLTINSLEAEDAAMYYCHQSSSLPRTFGQGTKVEIKRTVAAPSVFIFPPSDEQLKSGTASVVCLLNNFYPREAKVQWKVDNALQSGNSQESVTEQDSKDSTYSLSSTLTLSKADYEKHKVYACEVTHQGLSSPVTKSFNRGEC

SEQ ID NO: 1606 - protein, 214 aa, Synthetic construct
AIQMTQSPSSLSASVGDRVTITCRASQGIRNDLGWYQQKPGKAPKLLIYAASSLQSGVPSRFSGSGSGTDFTLTISSLQPEDFASYYCLQDYNWPYTFGQGTKLEIKRTVAAPSVFIFPPSDEQLKSGTASVVCLLNNFYPREAKVQWKVDNALQSGNSQESVTEQDSKDSTYSLSSTLTLSKADYEKHKVYACEVTHQGLSSPVTKSFNRGEC

SEQ ID NO: 1607 - protein, 215 aa, Synthetic construct
EIVLTQSPGTLSLSPGERATLSCRASQSVRSSYFAWYQQKPGQAPRLLIYGASSRATGIPDRFSGSGSGTDFTLTISRLEPEDFAVYYCQQYGSSPRTFGQGTKVEIKRTVAAPSVFIFPPSDEQLKSGTASVVCLLNNFYPREAKVQWKVDNALQSGNSQESVTEQDSKDSTYSLSSTLTLSKADYEKHKVYACEVTHQGLSSPVTKSFNRGEC

SEQ ID NO: 1608 - protein, 220 aa, Synthetic construct
DIVMTQSPDSLAVSLGERATINCKSSQSVLYSSNNKNYLAWYQQKPGQPPKLLIYWASTRESGVPDRFSGSGSGTDFTLTISSLQAEDVAVYYCQQYFGTPRTFGQGTKVEIKRTVAAPSVFIFPPSDEQLKSGTASVVCLLNNFYPREAKVQWKVDNALQSGNSQESVTEQDSKDSTYSLSSTLTLSKADYEKHKVYACEVTHQGLSSPVTKSFNRGEC

SEQ ID NO: 1609 - protein, 214 aa, Synthetic construct
EIVLTQSPATLSLSPGERATLSCRASQSVSSYLAWYQQKPGQAPRLLIYDASNRATGIPARFSGSGSGTDFTLTISSLQSEDFAVYYCQQRSNWPLTFGGGTKVEIKRTVAAPSVFIFPPSDEQLKSGTASVVCLLNNFYPREAKVQWKVDNALQSGNSQESVTEQDSKDSTYSLSSTLTLSKADYEKHKVYACEVTHQGLSSPVTKSFNRGEC

SEQ ID NO: 1610 - protein, 214 aa, Synthetic construct
DIQMTQSPSSLSASVGDRVTITCRASQTIRSYLNWYQQKPGKAPKLLIYAASSLQSGVPSRFSGSGSGTNFTLTISSLQPEDFATYSCQQSYTTPLTFGGGTKVEIKRTVAAPSVFIFPPSDEQLKSGTASVVCLLNNFYPREAKVQWKVDNALQSGNSQESVTEQDSKDSTYSLSSTLTLSKADYEKHKVYACEVTHQGLSSPVTKSFNRGEC

SEQ ID NO: 1611 - protein, 215 aa, Synthetic construct
EIVLTQSPGTLSLSPGERATLSCRASQSISSSYLAWYQREPGQAPRLLIYGASSRATGIPDRFSGSGSGTDFTLTISRLEPEDFVVYYCQQYGSSPITFGQGTRLEIKRTVAAPSVFIFPPSDEQLKSGTASVVCLLNNFYPREAKVQWKVDNALQSGNSQESVTEQDSKDSTYSLSSTLTLSKADYEKHKVYACEVTHQGLSSPVTKSFNRGEC

SEQ ID NO: 1612 - protein, 215 aa, Synthetic construct
EIVLTQSPGTLSLSPGERATLSCRASQSVRSSYLAWYQQKPGQAPRLLIYGASSRATGIPDRFSGSGSGTDFTLTFSRLEPEDFAVYYCQQYGSSPYTFGQGTKLEIKRTVAAPSVFIFPPSDEQLKSGTASVVCLLNNFYPREAKVQWKVDNALQSGNSQESVTEQDSKDSTYSLSSTLTLSKADYEKHKVYACEVTHQGLSSPVTKSFNRGEC

SEQ ID NO: 1613 - protein, 214 aa, Synthetic construct
DIQMTQSPSSLSASVGDRVTITCQASQDISNYLNWYQQKPGKAPKLLIYDASNLETGVPSRFSGSGSGTDFTFTISSLQPEDFATYYCQQANSFPLTFGGGTKVEIKRTVAAPSVFIFPPSDEQLKSGTASVVCLLNNFYPREAKVQWKVDNALQSGNSQESVTEQDSKDSTYSLSSTLTLSKADYEKHKVYACEVTHQGLSSPVTKSFNRGEC

SEQ ID NO: 1614 - protein, 215 aa, Synthetic construct
EIVLTQSPGTLSLSPGERATLSCRASQSVSSSYLAWYQQKPGQAPRLLIYGASSRATGIPDRFSGSGSGTDFTLTISRLEPEDFAVYYCQQYGSSPFTFGPGTKVDIKRTVAAPSVFIFPPSDEQLKSGTASVVCLLNNFYPREAKVQWKVDNALQSGNSQESVTEQDSKDSTYSLSSTLTLSKADYEKHKVYACEVTHQGLSSPVTKSFNRGEC

SEQ ID NO: 1615 - protein, 220 aa, Synthetic construct
DIVMTQSPDSLAVSLGERATINCKSSQSVLYSSNNKNYLAWYQQKPGQPPKLLIYWASTRESGVPDRFSGSGSGTDFTLTISSLQAEDVAVYYCQQYYSTPWTFGQGTRLEIKRTVAAPSVFIFPPSDEQLKSGTASVVCLLNNFYPREAKVQWKVDNALQSGNSQESVTEQDSKDSTYSLSSTLTLSKADYEKHKVYACEVTHQGLSSPVTKSFNRGEC

SEQ ID NO: 1616 - protein, 213 aa, Synthetic construct
DIQMTQSPSSLSASVGDRVTITCRASQDISNYLNWYQQKPGKAPKLLIYAASSLESGVPSRFSGSGSGTDFTLTISSLQPEDFATYYCQQSYSTPTFGGGTKVEIKRTVAAPSVFIFPPSDEQLKSGTASVVCLLNNFYPREAKVQWKVDNALQSGNSQESVTEQDSKDSTYSLSSTLTLSKADYEKHKVYACEVTHQGLSSPVTKSFNRGEC

SEQ ID NO: 1617 - protein, 220 aa, Synthetic construct
DIVMTQSPDSLAVSLGERATINCKSSQSVLYRSNNKNYLAWYQQKPGQPPKLLIYWASTRESGVPDRFSGSGSGTDFTLTISSLQAEDVAVYYCQQYYGTPRTFGQGTKVEIKRTVAAPSVFIFPPSDEQLKSGTASVVCLLNNFYPREAKVQWKVDNALQSGNSQESVTEQDSKDSTYSLSSTLTLSKADYEKHKVYACEVTHQGLSSPVTKSFNRGEC

SEQ ID NO: 1618 - protein, 214 aa, Synthetic construct
DIQMTQSPSSLSASVGDRVTITCQASQDIKNCLNWYQQKPGKAPKLLIYDASNLETGVPSRFSGSGSGTDFTFTISSLQPEDIATYYCQQFDNLPLTFGGGTKVEIKRTVAAPSVFIFPPSDEQLKSGTASVVCLLNNFYPREAKVQWKVDNALQSGNSQESVTEQDSKDSTYSLSSTLTLSKADYEKHKVYACEVTHQGLSSPVTKSFNRGEC

SEQ ID NO: 1619 - protein, 219 aa, Synthetic construct
DIVMTQSPDSLAVSLGERATINCKSSQTILYRSNIKNYLAWYQQKPGQPPKLLISWASTRESGVPDRFSGSGSGTDFTLTISSLQAEDVAVYYCQQYYSTRTFGQGTKLEIKRTVAAPSVFIFPPSDEQLKSGTASVVCLLNNFYPREAKVQWKVDNALQSGNSQESVTEQDSKDSTYSLSSTLTLSKADYEKHKVYACEVTHQGLSSPVTKSFNRGEC

SEQ ID NO: 1620 - protein, 220 aa, Synthetic construct
DIVMTQSPDSLAVSLGERATINCKSSQSVLYSSNNKNYLAWYQQKPGQPPKLLIYWASTRESGVPDRFSGSGSGTDFTLTISSLQAEDVAVYYCQQYYSTPRTFGQGTKVEIKRTVAAPSVFIFPPSDEQLKSGTASVVCLLNNFYPREAKVQWKVDNALQSGNSQESVTEQDSKDSTYSLSSTLTLSKADYEKHKVYACEVTHQGLSSPVTKSFNRGEC

SEQ ID NO: 1621 - protein, 214 aa, Synthetic construct
DIQMTQSPSTLSASVGDRVTITCRASQGISSWLAWYQQKPGKAPKLLIYAASSLQSGVPSRFSGSGSGTDFTLTISSLQPEDFATYYCQQANSFPLTFGGGTKVEIKRTVAAPSVFIFPPSDEQLKSGTASVVCLLNNFYPREAKVQWKVDNALQSGNSQESVTEQDSKDSTYSLSSTLTLSKADYEKHKVYACEVTHQGLSSPVTKSFNRGEC

SEQ ID NO: 1622 - protein, 220 aa, Synthetic construct
DIVMTQSPDSLAVSLGERATINCKSSQSVLYSSNNKNYLAWYQQKPGQPPKLLIYWASTRESGVPDRFSGSGSGTDFTLTISSLQAEDVAVYYCQQYYSTPPTFGQGTKVEIKRTVAAPSVFIFPPSDEQLKSGTASVVCLLNNFYPREAKVQWKVDNALQSGNSQESVTEQDSKDSTYSLSSTLTLSKADYEKHKVYACEVTHQGLSSPVTKSFNRGEC

SEQ ID NO: 1623 - protein, 214 aa, Synthetic construct
DIQMTQSPSSLSASVGDRVTITCRASQSISSYLNWYQQKPGKAPKLLIYAASSLQSGVPSRFSGSGSGTDFTLTISSLQPEDFATYYCQQSYSTPYTFGQGTKLEIKRTVAAPSVFIFPPSDEQLKSGTASVVCLLNNFYPREAKVQWKVDNALQSGNSQESVTEQDSKDSTYSLSSTLTLSKADYEKHKVYACEVTHQGLSSPVTKSFNRGEC

SEQ ID NO: 1624 - protein, 220 aa, Synthetic construct
DIVMTQSPDSLAVSLGERATINCKSSQSVLYSSNNKNYLAWYQQKPGQPPKLLIYWASTRESGVPDRFSGSGSGTDFTLTISSLQAEDVAVYYCQQFYDTPRTFGQGTKVEIKRTVAAPSVFIFPPSDEQLKSGTASVVCLLNNFYPREAKVQWKVDNALQSGNSQESVTEQDSKDSTYSLSSTLTLSKADYEKHKVYACEVTHQGLSSPVTKSFNRGEC

SEQ ID NO: 1625 - protein, 214 aa, Synthetic construct
DIQMTQSPSSLSASVGDRVTITCRASQGISNYLAWYQQKPGKVPKLLIYVASTLQSGVPSRFSGSGSGTDFTLTISSLQPEDVATYYCQNYISAPLTFGGGTKVEIKRTVAAPSVFIFPPSDEQLKSGTASVVCLLNNFYPREAKVQWKVDNALQSGNSQESVTEQDSKDSTYSLSSTLTLSKADYEKHKVYACEVTHQGLSSPVTKSFNRGEC

SEQ ID NO: 1626 - protein, 220 aa, Synthetic construct
DIVMTQSPDSLAVSLGERATINCKSSQSVLYSSNNKNYLAWYQQKPGQPPKLLIYWASTRESGVPDRFSGSGSGTDFTLTISSLQAEDVAVYYCQQYYSTPWTFGQGTKVEIKRTVAAPSVFIFPPSDEQLKSGTASVVCLLNNFYPREAKVQWKVDNALQSGNSQESVTEQDSKDSTYSLSSTLTLSKADYEKHKVYACEVTHQGLSSPVTKSFNRGEC

SEQ ID NO: 1627 - protein, 215 aa, Synthetic construct
EIVLTQSPGTLSLSPGERATLSCRASQSVSSSYLAWYQQKPGQAPRLLIYGASSRATGIPDRFSGSGSGTDFTLTISRLEPEDFAVYYCQQYGSSPYTFGQGTKLEIKRTVAAPSVFIFPPSDEQLKSGTASVVCLLNNFYPREAKVQWKVDNALQSGNSQESVTEQDSKDSTYSLSSTLTLSKADYEKHKVYACEVTHQGLSSPVTKSFNRGEC

SEQ ID NO: 1628 - protein, 214 aa, Synthetic construct
DIQMTQSPSSLSASVGDRVNITCRASQGISNYLAWYQQKPGKVPKLLIYAASTLQSGVPSRFSGSGSGTDFTLTISSLQPEDVASYFCQKYISAPLTFGGGTKVEIKRTVAAPSVFIFPPSDEQLKSGTASVVCLLNNFYPREAKVQWKVDNALQSGNSQESVTEQDSKDSTYSLSSTLTLSKADYEKHKVYACEVTHQGLSSPVTKSFNRGEC

SEQ ID NO: 1629 - protein, 214 aa, Synthetic construct
DIQMTQSPSSLSASVGDRVTITCRASQGISNYLAWYQQKPGKVPKLLIYAASTLQSGVPSRFSGSGSGTDFTLTISSLQPEDVASYYCQDYTSAPLTFGGGTKVEIKRTVAAPSVFIFPPSDEQLKSGTASVVCLLNNFYPREAKVQWKVDNALQSGNSQESVTEQDSKDSTYSLSSTLTLSKADYEKHKVYACEVTHQGLSSPVTKSFNRGEC

SEQ ID NO: 1630 - protein, 215 aa, Synthetic construct
EIVLTQSPGTLSLSPGERATLSCRASQSVSDSYLAWYQQEPGQAPRLLIYGASSRATGIPDRFSGSGSGTDFTLTISRLEPEDFALYYCQQYDSSPFTFGPGTKVDIKRTVAAPSVFIFPPSDEQLKSGTASVVCLLNNFYPREAKVQWKVDNALQSGNSQESVTEQDSKDSTYSLSSTLTLSKADYEKHKVYACEVTHQGLSSPVTKSFNRGEC

SEQ ID NO: 1631 - protein, 220 aa, Synthetic construct; identical to SEQ ID NO: 561

SEQ ID NO: 1632 - protein, 220 aa, Synthetic construct; identical to SEQ ID NO: 562

SEQ ID NO: 1633 - protein, 220 aa, Synthetic construct; identical to SEQ ID NO: 562

SEQ ID NO: 1634 - protein, 220 aa, Synthetic construct; identical to SEQ ID NO: 562

SEQ ID NO: 1635 - protein, 220 aa, Synthetic construct; identical to SEQ ID NO: 562

SEQ ID NO: 1636 - protein, 214 aa, Synthetic construct
DIQMTQSPSSLSASVGDRVTITCRASQTIRNFLNWYQRKPGKAPKILIYAASSLQSGVPSRFSGSGSGTDFTLTISSLQPADFATYYCQQTYSIPITFGQGTRLEIKRTVAAPSVFIFPPSDEQLKSGTASVVCLLNNFYPREAKVQWKVDNALQSGNSQESVTEQDSKDSTYSLSSTLTLSKADYEKHKVYACEVTHQGLSSPVTKSFNRGEC

SEQ ID NO: 1637 - protein, 214 aa, Synthetic construct
DIQMTQSPSSLSASVGDRVTITCRASQSISRYLNWYQQKPGKAPKLLLYAASSLQSGVPSKFSGSGSGTDFTLTISSLQPEDFATYYCQQSYSSPITFGQGTRLEIKRTVAAPSVFIFPPSDEQLKSGTASVVCLLNNFYPREAKVQWKVDNALQSGNSQESVTEQDSKDSTYSLSSTLTLSKADYEKHKVYACEVTHQGLSSPVTKSFNRGEC

SEQ ID NO: 1638 - protein, 219 aa, Synthetic construct
DIVMTQSPLSLPVTPGEPASISCRSSQSLLHSNGYNYLDWYLQKPGQSPQLLIYLGSNRASGVPDRFSGSGSGTDFTLKISRVEAEDVGVYYCMQTLQTPPTFGQGTKVEIKRTVAAPSVFIFPPSDEQLKSGTASVVCLLNNFYPREAKVQWKVDNALQSGNSQESVTEQDSKDSTYSLSSTLTLSKADYEKHKVYACEVTHQGLSSPVTKSFNRGEC

SEQ ID NO: 1639 - protein, 214 aa, Synthetic construct
DIQLTQSPSFLSASVGDRLTITCRASQGISSYLAWYQQKPGKAPKLLIYTASTLQSGVPSRFSGSGSGTEFTLTISSLQPEDFATYYCQQLNGYPPTFGQGTKVEIKRTVAAPSVFIFPPSDEQLKSGTASVVCLLNNFYPREAKVQWKVDNALQSGNSQESVTEQDSKDSTYSLSSTLTLSKADYEKHKVYACEVTHQGLSSPVTKSFNRGEC

SEQ ID NO: 1640 - protein, 214 aa, Synthetic construct
DIQMTQSPSSLSASVGDRVTITCRASQSITSYLNWYQQKPGKAPKLLIFAASSLQSGVPSRFSGSGSGTDFTLTISSLQPEDFATYYCQQSYSTPLTFGGGTKVEIKRTVAAPSVFIFPPSDEQLKSGTASVVCLLNNFYPREAKVQWKVDNALQSGNSQESVTEQDSKDSTYSLSSTLTLSKADYEKHKVYACEVTHQGLSSPVTKSFNRGEC

SEQ ID NO: 1641 - protein, 220 aa, Synthetic construct; identical to SEQ ID NO: 1620

SEQ ID NO: 1642 - protein, 214 aa, Synthetic construct
DIQMTQSPSSLSASVGERVTITCRASQSISSYLNWYQQKPGKAPNLLIYAASSFQSGVPSRVSGSGSGTDFTLTISSLQPEDFATYYCQQSYSNPYTFGQGTKLEIKRTVAAPSVFIFPPSDEQLKSGTASVVCLLNNFYPREAKVQWKVDNALQSGNSQESVTEQDSKDSTYSLSSTLTLSKADYEKHKVYACEVTHQGLSSPVTKSFNRGEC

SEQ ID NO: 1643 - protein, 215 aa, Synthetic construct
EIVLTQSPGTLSLSPGERATLSCRASQSVSRSYLAWYQQKPGQAPRLLIYGASSRATGIPDRFSGSGSGTDFTLTISRLEPEDFAVYYCQQYGSSPWTFGQGTKVEIKRTVAAPSVFIFPPSDEQLKSGTASVVCLLNNFYPREAKVQWKVDNALQSGNSQESVTEQDSKDSTYSLSSTLTLSKADYEKHKVYACEVTHQGLSSPVTKSFNRGEC

SEQ ID NO: 1644 - protein, 219 aa, Synthetic construct
DIVMTQSPLSLPVTPGEPASISCRSSQILLHTNGYNYLDWYLQKPGQSPQLLIYLGSYRASGVPDRFSGSGSGTDFTLKISRVEAGDVGLYYCMQALQTPLTFGGGTKVEIKRTVAAPSVFIFPPSDEQLKSGTASVVCLLNNFYPREAKVQWKVDNALQSGNSQESVTEQDSKDSTYSLSSTLTLSKADYEKHKVYACEVTHQGLSSPVTKSFNRGEC

SEQ ID NO: 1645 - protein, 192 aa, Homo sapiens
ITHRIHWESASLLRSEETKENEGFTVTAEGKGQGTLSVVTMYHAKAKDQLTCNKFDLKVTIKPAPETGIPSPIFLSSVFLEKRPQDAKNTMILEICTRYRGDQDATMSILDISMMTGFAPDTDDLKQLANGVDRYISKYELDKAFSDRNTLIIYLDKVSHSEDDCLAFKVHQYFNVELIQPGAVKVYAYYNL

What is claimed is:

1. A bispecific antibody, or antigen binding fragment thereof, which specifically binds human Complement Factor H Related 4 (CFHR) and human Complement Component 3 (C3), optionally wherein said human CFHR4 is the CFHR4 b variant (CFHR4b), which is optionally a polypeptide comprising or consisting of the amino acid sequence of SEQ ID NO: 580, and optionally wherein said human C3 is the b variant of C3 (C3b), which is optionally a polypeptide comprising or consisting of the amino acid sequence of SEQ ID NO: 1645.

2. The bispecific antibody of fragment of claim 1, which is monoclonal, optionally recombinant.

3. The bispecific antibody or fragment according to any one of the preceding claims, which is human, humanized or chimeric.

4. The bispecific antibody or fragment according to any one of the preceding claims, which is a full length antibody, a single chain antibody, a single chain variable fragment (scFv), a variable fragment (Fv), a fragment antigen-binding region (Fab), a Fab-C, a Fab′-SH, a (Fab′)2, a single-domain antibody (sdAb), a VHH antibody, a nanobody, a camelid-derived single-domain antibody, a shark IgNAR-derived single-domain antibody fragment (VNAR), a diabody, a triabody, an anticalin or an aptamer, optionally wherein the antibody is a full length antibody comprising an Fc region such as a human IgG1, IgG2, IgG3 or IgG4 region.

5. The bispecific antibody or fragment according to any one of the preceding claims, which is conjugated to at least one additional moiety, optionally selected from:
a. an antigen binding moiety, such as an antibody or antigen-binding fragment thereof, which is capable of specific binding to a target which is not human CFHR4 or human C3, preferably wherein said target is expressed in the human eye;
b. a therapeutic or cytotoxic moiety;
c. a detection moiety;
d. a purification moiety;
e. a half-life extension moiety, optionally a polypeptide that is at least 20 amino acids in length and comprises any combination of G, A, S T, E, and P residue, which polypeptide is conjugated to the C- or N-terminus of the antibody.

6. The bispecific antibody or fragment according to any one of the preceding claims, which is a polypeptide comprising:
a. one, two or all three HCDRs of any one of the exemplary CFHR4 antibodies the sequences of which are provided in Table 3; and one, two or all three of the corresponding LCDRs of said exemplary antibody; and/or
b. a VH sequence having at least 90% identity to the VH sequence of any one of the exemplary CFHR4 antibodies the sequences of which are provided in Table 4; and optionally a VL sequence having at least 90% identity to the corresponding VL sequence of said exemplary antibody, preferably wherein variation is not permitted in the HCDRs or LCDRs; and/or
c. all six CDRs of any one of the exemplary CFHR4 antibodies the sequences of which are provided in Table 3;
d. the VH and VL sequences of any one of the exemplary CFHR4 antibodies the sequences of which are provided in Table 4; and/or
e. the full length heavy chain (VH+constant) sequence of any one of the exemplary CFHR4 antibodies the sequences of which are provided in Table 5; and optionally the corresponding full length light chain (VL+constant) sequence of said exemplary antibody.

7. The bispecific antibody or fragment according to any one of the preceding claims, which is a polypeptide comprising:
a. one, two or all three HCDRs of any one of the exemplary C3 antibodies the sequences of which are provided in Table 6; and one, two or all three of the corresponding LCDRs of said exemplary antibody; and/or
b. a VH sequence having at least 90% identity to the VH sequence of any one of the exemplary C3 antibodies the sequences of which are provided in Table 7; and optionally a VL sequence having at least 90% identity to the corresponding VL sequence of said exemplary antibody provided in Table 8, preferably wherein variation is not permitted in the HCDRs or LCDRs; and/or
c. all six CDRs of any one of the exemplary C3 antibodies the sequences of which are provided in Table 6;
d. the VH and VL sequences of any one of the exemplary C3 antibodies the sequences of which are provided in Tables 7 and 8; and/or
e. the full length heavy chain (VH+constant) sequence of any one of the exemplary C3 antibodies the sequences of which are provided in Table 9; and optionally the corresponding full length light chain (VL+constant) sequence of said exemplary antibody provided in Table 10.

8. A polynucleotide encoding an antibody or fragment according to any one of the preceding claims, optionally wherein said polynucleotide comprises or consists of a nucleic acid sequence having at least 70, 80, 90 or 100% identity to a nucleic acid sequence of any one of the exemplary antibodies the sequences of which are provided in Tables 5, 9, and 10.

9. An expression vector comprising the polynucleotide of claim 8, which is optionally an adeno-associated virus (AAV) vector, a lentiviral (LV) vector, a herpes simplex virus (HSV) vector, or a retrovirus vector.

10. A pharmaceutical composition comprising an antibody or fragment, a polynucleotide, or a vector according to any one of the preceding claims, and optionally
a. at least one pharmaceutically acceptable carrier, diluent or preservative; and/or
b. at least one additional active ingredient.

11. The pharmaceutical composition of claim 10, which is suitable for ocular administration to a subject, optionally by delivery using a conjunctival insert, a contact lens, a gel, a nanoparticle, a mucoadhesive polymer, an ointment, a solution, a suspension, eye drops, and/or an implant, preferably by injection into the vitreous fluid.

12. The antibody or fragment according to any one of claims 1 to 7, the polynucleotide of claim 8, the vector of claim 9, or the composition of claim 10 or 11, for use as a medicament, optionally for use in a method of treating a disease of the eye in a subject.

13. The antibody, fragment, polynucleotide, vector or composition for use according to claim 12, wherein said disease is characterized by increased activation of the complement system, in particular the alternative pathway, and in particular within the eye of the subject, for example in drusen or retinal pigment epithelium (RPE) cells of the subject.

14. The antibody, fragment, polynucleotide, vector or composition for use according to claim 12 or 13, wherein the method comprises ocular administration of the antibody, preferably by injection into the vitreous fluid, and wherein said administration preferably relieves at least one symptom in the subject selected from visual distortion, reduced central vision, blurred vision, and/or difficulty adapting to low light.

15. The antibody, fragment, polynucleotide, vector or composition for use according to any one of claims 12 to 14, where the disease is age-related macular degeneration (AMD), optionally wherein said AMD is dry AMD, which may be at an early, intermediate or advanced stage (the latter otherwise known as geographic atrophy, GA).

16. A bispecific antibody comprising a first antigen-binding site directed against Complement Factor H Related 4 (CFHR4) and a second antigen-binding site directed against Complement Component 3 (C3):
wherein the first anti-CFHR4 antigen-binding site comprises a heavy chain variable region (VH) comprising complementarity determining regions (CDRs) HCDR1, HCDR2, and HCDR3 from at least one of SEQ ID NOs: 260-265, 284-293, 324-334, and 368-380; and a light chain variable region (VL) comprising complementarity determining regions (CDRs) LCDR1, LCDR2, and LCDR3 from at least one of SEQ ID NOs: 272-277, 304-313, 346-356, and 394-406; and
wherein the second anti-C3 antigen-binding site comprises a heavy chain variable region (VH) comprising complementarity determining regions (CDRs) HCDR1, HCDR2, and HCDR3; and a light chain variable region (VL) comprising complementarity determining regions (CDRs) LCDR1, LCDR2, and LCDR3.

17. A bispecific antibody comprising a first antigen-binding site directed against Complement Factor H Related 4 (CFHR4) and a second antigen-binding site directed against Complement Component 3 (C3):
wherein the first anti-CFHR4 antigen-binding site comprises a heavy chain variable region (VH) comprising complementarity determining regions (CDRs) HCDR1, HCDR2, and HCDR3; and a light chain variable region (VL) comprising complementarity determining regions (CDRs) LCDR1, LCDR2, and LCDR3; and
wherein the second anti-C3 antigen-binding site comprises a heavy chain variable region (VH) comprising complementarity determining regions (CDRs) HCDR1, HCDR2, and HCDR3 from at least one of SEQ ID NOs: 1127-1200; and a light chain variable region (VL) comprising complementarity determining regions (CDRs) LCDR1, LCDR2, and LCDR3 from at least one of SEQ ID NOs: 1275-1348.

18. A bispecific antibody comprising a first antigen-binding site directed against Complement Factor H Related 4 (CFHR4) and a second antigen-binding site directed against Complement Component 3 (C3):
wherein the first anti-CFHR4 antigen-binding site comprises a heavy chain variable region (VH) comprising complementarity determining regions (CDRs) HCDR1, HCDR2, and HCDR3 from at least one of SEQ ID NOs: 260-265, 284-293, 324-334, and 368-380; and a light chain variable region (VL) comprising complementarity determining regions (CDRs) LCDR1, LCDR2, and LCDR3 from at least one of SEQ ID NOs: 272-277, 304-313, 346-356, and 394-406; and
wherein the second anti-C3 antigen-binding site comprises a heavy chain variable region (VH) comprising complementarity determining regions (CDRs) HCDR1, HCDR2, and HCDR3 from at least one of SEQ ID NOs: 1127-1200; and a light chain variable region (VL) comprising complementarity determining regions (CDRs) LCDR1, LCDR2, and LCDR3 from at least one of SEQ ID NOs: 1275-1348.

19. The bispecific antibody of any one of claims 16 to 18, wherein the anti-CFHR4 HCDR1 comprises the amino acid sequence of SEQ ID NO: 2; the anti-CFHR4 HCDR2 comprises the amino acid sequence of SEQ ID NO: 9; and the anti-CFHR4 HCDR3 comprises the amino acid sequence of SEQ ID NO: 15.

20. The bispecific antibody of any one of claims 16 to 18, wherein the anti-CFHR4 HCDR1 comprises the amino acid sequence of SEQ ID NO: 3; the anti-CFHR4 HCDR2 comprises the amino acid sequence of SEQ ID NO: 10; and the anti-CFHR4 HCDR3 comprises the amino acid sequence of SEQ ID NO: 16.

21. The bispecific antibody of any one of claims 16 to 18, wherein the anti-CFHR4 HCDR1 comprises the amino acid sequence of SEQ ID NO: 4; the anti-CFHR4 HCDR2 comprises the amino acid sequence of SEQ ID NO: 11; and the anti-CFHR4 HCDR3 comprises the amino acid sequence of SEQ ID NO: 17.

22. The bispecific antibody of any one of claims 16 to 18, wherein the anti-CFHR4 HCDR1 comprises the amino acid sequence of SEQ ID NO: 5; the anti-CFHR4 HCDR2 comprises the amino acid sequence of SEQ ID NO: 12; and the anti-CFHR4 HCDR3 comprises the amino acid sequence of SEQ ID NO: 18.

23. The bispecific antibody of any one of claims 16 to 18, wherein the anti-CFHR4 HCDR1 comprises the amino acid sequence of SEQ ID NO: 6; the anti-CFHR4 HCDR2 comprises the amino acid sequence of SEQ ID NO: 13; and the anti-CFHR4 HCDR3 comprises the amino acid sequence of SEQ ID NO: 19.

24. The bispecific antibody of any one of claims 16 to 18, wherein the anti-CFHR4 HCDR1 comprises the amino acid sequence of SEQ ID NO: 7; the anti-CFHR4 HCDR2 comprises the amino acid sequence of SEQ ID NO: 14; and the anti-CFHR4 HCDR3 comprises the amino acid sequence of SEQ ID NO: 20.

25. The bispecific antibody of any one of claims 16 to 18, wherein the anti-CFHR4 HCDR1 comprises the amino acid sequence of SEQ ID NO: 22; the anti-CFHR4 HCDR2 comprises the amino acid sequence of SEQ ID NO: 33; and the anti-CFHR4 HCDR3 comprises the amino acid sequence of SEQ ID NO: 43.

26. The bispecific antibody of any one of claims 16 to 18, wherein the anti-CFHR4 HCDR1 comprises the amino acid sequence of SEQ ID NO: 23; the anti-CFHR4 HCDR2 comprises the amino acid sequence of SEQ ID NO: 34; and the anti-CFHR4 HCDR3 comprises the amino acid sequence of SEQ ID NO: 44.

27. The bispecific antibody of any one of claims 16 to 18, wherein the anti-CFHR4 HCDR1 comprises the amino acid sequence of SEQ ID NO: 24; the anti-CFHR4 HCDR2 comprises the amino acid sequence of SEQ ID NO: 35; and the anti-CFHR4 HCDR3 comprises the amino acid sequence of SEQ ID NO: 45.

28. The bispecific antibody of any one of claims 16 to 18, wherein the anti-CFHR4 HCDR1 comprises the amino acid sequence of SEQ ID NO: 25; the anti-CFHR4 HCDR2 comprises the amino acid sequence of SEQ ID NO: 36; and the anti-CFHR4 HCDR3 comprises the amino acid sequence of SEQ ID NO: 46.

29. The bispecific antibody of any one of claims 16 to 18, wherein the anti-CFHR4 HCDR1 comprises the amino acid sequence of SEQ ID NO: 26; the anti-CFHR4 HCDR2 comprises the amino acid sequence of SEQ ID NO: 37; and the anti-CFHR4 HCDR3 comprises the amino acid sequence of SEQ ID NO: 47.

30. The bispecific antibody of any one of claims 16 to 18, wherein the anti-CFHR4 HCDR1 comprises the amino acid sequence of SEQ ID NO: 27; the anti-CFHR4 HCDR2 comprises the amino acid sequence of SEQ ID NO: 38; and the anti-CFHR4 HCDR3 comprises the amino acid sequence of SEQ ID NO: 48.

31. The bispecific antibody of any one of claims 16 to 18, wherein the anti-CFHR4 HCDR1 comprises the amino acid sequence of SEQ ID NO: 28; the anti-CFHR4 HCDR2 comprises the amino acid sequence of SEQ ID NO: 39; and the anti-CFHR4 HCDR3 comprises the amino acid sequence of SEQ ID NO: 49.

32. The bispecific antibody of any one of claims 16 to 18, wherein the anti-CFHR4 HCDR1 comprises the amino acid sequence of SEQ ID NO: 29; the anti-CFHR4 HCDR2 comprises the amino acid sequence of SEQ ID NO: 40; and the anti-CFHR4 HCDR3 comprises the amino acid sequence of SEQ ID NO: 50.

33. The bispecific antibody of any one of claims 16 to 18, wherein the anti-CFHR4 HCDR1 comprises the amino acid sequence of SEQ ID NO: 30; the anti-CFHR4 HCDR2 comprises the amino acid sequence of SEQ ID NO: 41; and the anti-CFHR4 HCDR3 comprises the amino acid sequence of SEQ ID NO: 51.

34. The bispecific antibody of any one of claims 16 to 18, wherein the anti-CFHR4 HCDR1 comprises the amino acid sequence of SEQ ID NO: 31; the anti-CFHR4 HCDR2 comprises the amino acid sequence of SEQ ID NO: 42; and the anti-CFHR4 HCDR3 comprises the amino acid sequence of SEQ ID NO: 52.

35. The bispecific antibody of any one of claims 16 to 18, wherein the anti-CFHR4 HCDR1 comprises the amino acid sequence of SEQ ID NO: 54; the anti-CFHR4 HCDR2 comprises the amino acid sequence of SEQ ID NO: 66; and the anti-CFHR4 HCDR3 comprises the amino acid sequence of SEQ ID NO: 77.

36. The bispecific antibody of any one of claims 16 to 18, wherein the anti-CFHR4 HCDR1 comprises the amino acid sequence of SEQ ID NO: 55; the anti-CFHR4 HCDR2 comprises the amino acid sequence of SEQ ID NO: 67; and the anti-CFHR4 HCDR3 comprises the amino acid sequence of SEQ ID NO: 78.

37. The bispecific antibody of any one of claims 16 to 18, wherein the anti-CFHR4 HCDR1 comprises the amino acid sequence of SEQ ID NO: 56; the anti-CFHR4 HCDR2 comprises the amino acid sequence of SEQ ID NO: 68; and the anti-CFHR4 HCDR3 comprises the amino acid sequence of SEQ ID NO: 79.

38. The bispecific antibody of any one of claims 16 to 18, wherein the anti-CFHR4 HCDR1 comprises the amino acid sequence of SEQ ID NO: 57; the anti-CFHR4 HCDR2 comprises the amino acid sequence of SEQ ID NO: 69; and the anti-CFHR4 HCDR3 comprises the amino acid sequence of SEQ ID NO: 80.

39. The bispecific antibody of any one of claims 16 to 18, wherein the anti-CFHR4 HCDR1 comprises the amino acid sequence of SEQ ID NO: 58; the anti-CFHR4 HCDR2 comprises the amino acid sequence of SEQ ID NO: 70; and the anti-CFHR4 HCDR3 comprises the amino acid sequence of SEQ ID NO: 81.

40. The bispecific antibody of any one of claims 16 to 18, wherein the anti-CFHR4 HCDR1 comprises the amino acid sequence of SEQ ID NO: 59; the anti-CFHR4 HCDR2 comprises the amino acid sequence of SEQ ID NO: 71; and the anti-CFHR4 HCDR3 comprises the amino acid sequence of SEQ ID NO: 82.

41. The bispecific antibody of any one of claims 16 to 18, wherein the anti-CFHR4 HCDR1 comprises the amino acid sequence of SEQ ID NO: 60; the anti-CFHR4 HCDR2 comprises the amino acid sequence of SEQ ID NO: 72; and the anti-CFHR4 HCDR3 comprises the amino acid sequence of SEQ ID NO: 83.

42. The bispecific antibody of any one of claims 16 to 18, wherein the anti-CFHR4 HCDR1 comprises the amino acid sequence of SEQ ID NO: 61; the anti-CFHR4 HCDR2 comprises the amino acid sequence of SEQ ID NO: 73; and the anti-CFHR4 HCDR3 comprises the amino acid sequence of SEQ ID NO: 84.

43. The bispecific antibody of any one of claims 16 to 18, wherein the anti-CFHR4 HCDR1 comprises the amino acid sequence of SEQ ID NO: 62; the anti-CFHR4 HCDR2 comprises the amino acid sequence of SEQ ID NO: 74; and the anti-CFHR4 HCDR3 comprises the amino acid sequence of SEQ ID NO: 85.

44. The bispecific antibody of any one of claims 16 to 18, wherein the anti-CFHR4 HCDR1 comprises the amino acid sequence of SEQ ID NO: 63; the anti-CFHR4 HCDR2 comprises the amino acid sequence of SEQ ID NO: 75; and the anti-CFHR4 HCDR3 comprises the amino acid sequence of SEQ ID NO: 86.

45. The bispecific antibody of any one of claims 16 to 18, wherein the anti-CFHR4 HCDR1 comprises the amino acid sequence of SEQ ID NO: 64; the anti-CFHR4 HCDR2 comprises the amino acid sequence of SEQ ID NO: 76; and the anti-CFHR4 HCDR3 comprises the amino acid sequence of SEQ ID NO: 87.

46. The bispecific antibody of any one of claims 16 to 18, wherein the anti-CFHR4 HCDR1 comprises the amino acid sequence of SEQ ID NO: 89; the anti-CFHR4 HCDR2 comprises the amino acid sequence of SEQ ID NO: 103; and the anti-CFHR4 HCDR3 comprises the amino acid sequence of SEQ ID NO: 116.

47. The bispecific antibody of any one of claims 16 to 18, wherein the anti-CFHR4 HCDR1 comprises the amino acid sequence of SEQ ID NO: 90; the anti-CFHR4 HCDR2 comprises the amino acid sequence of SEQ ID NO: 104; and the anti-CFHR4 HCDR3 comprises the amino acid sequence of SEQ ID NO: 117.

48. The bispecific antibody of any one of claims 16 to 18, wherein the anti-CFHR4 HCDR1 comprises the amino acid sequence of SEQ ID NO: 91; the anti-CFHR4 HCDR2 comprises the amino acid sequence of SEQ ID NO: 105; and the anti-CFHR4 HCDR3 comprises the amino acid sequence of SEQ ID NO: 118.

49. The bispecific antibody of any one of claims 16 to 18, wherein the anti-CFHR4 HCDR1 comprises the amino acid sequence of SEQ ID NO: 92; the anti-CFHR4 HCDR2 comprises the amino acid sequence of SEQ ID NO: 106; and the anti-CFHR4 HCDR3 comprises the amino acid sequence of SEQ ID NO: 119.

50. The bispecific antibody of any one of claims 16 to 18, wherein the anti-CFHR4 HCDR1 comprises the amino acid sequence of SEQ ID NO: 93; the anti-CFHR4 HCDR2 comprises the amino acid sequence of SEQ ID NO: 107; and the anti-CFHR4 HCDR3 comprises the amino acid sequence of SEQ ID NO: 120.

51. The bispecific antibody of any one of claims 16 to 18, wherein the anti-CFHR4 HCDR1 comprises the amino acid sequence of SEQ ID NO: 94; the anti-CFHR4 HCDR2 comprises the amino acid sequence of SEQ ID NO: 108; and the anti-CFHR4 HCDR3 comprises the amino acid sequence of SEQ ID NO: 121.

52. The bispecific antibody of any one of claims 16 to 18, wherein the anti-CFHR4 HCDR1 comprises the amino acid sequence of SEQ ID NO: 95; the anti-CFHR4 HCDR2 comprises the amino acid sequence of SEQ ID NO: 109; and the anti-CFHR4 HCDR3 comprises the amino acid sequence of SEQ ID NO: 122.

53. The bispecific antibody of any one of claims 16 to 18, wherein the anti-CFHR4 HCDR1 comprises the amino acid sequence of SEQ ID NO: 96; the anti-CFHR4 HCDR2 comprises the amino acid sequence of SEQ ID NO: 110; and the anti-CFHR4 HCDR3 comprises the amino acid sequence of SEQ ID NO: 123.

54. The bispecific antibody of any one of claims 16 to 18, wherein the anti-CFHR4 HCDR1 comprises the amino acid sequence of SEQ ID NO: 97; the anti-CFHR4 HCDR2 comprises the amino acid sequence of SEQ ID NO: 111; and the anti-CFHR4 HCDR3 comprises the amino acid sequence of SEQ ID NO: 124.

55. The bispecific antibody of any one of claims 16 to 18, wherein the anti-CFHR4 HCDR1 comprises the amino acid sequence of SEQ ID NO: 98; the anti-CFHR4 HCDR2 comprises the amino acid sequence of SEQ ID NO: 112; and the anti-CFHR4 HCDR3 comprises the amino acid sequence of SEQ ID NO: 125.

56. The bispecific antibody of any one of claims 16 to 18, wherein the anti-CFHR4 HCDR1 comprises the amino acid sequence of SEQ ID NO: 99; the anti-CFHR4 HCDR2 comprises the amino acid sequence of SEQ ID NO: 113; and the HCDR3 comprises the amino acid sequence of SEQ ID NO: 126.

57. The bispecific antibody of any one of claims 16 to 18, wherein the anti-CFHR4 HCDR1 comprises the amino acid sequence of SEQ ID NO: 100; the HCDR2 comprises the amino acid sequence of SEQ ID NO: 114; and the HCDR3 comprises the amino acid sequence of SEQ ID NO: 127.

58. The bispecific antibody of any one of claims 16 to 18, wherein the anti-CFHR4 HCDR1 comprises the amino acid sequence of SEQ ID NO: 101; the anti-CFHR4 HCDR2 comprises the amino acid sequence of SEQ ID NO: 115; and the anti-CFHR4 HCDR3 comprises the amino acid sequence of SEQ ID NO: 128.

59. The bispecific antibody of any one of claims 16 to 18, wherein the anti-CFHR4 LCDR1 comprises the amino acid sequence of SEQ ID NO: 130; the anti-CFHR4 LCDR2 comprises the amino acid sequence of SEQ ID NO: 153; and the anti-CFHR4 LCDR3 comprises the amino acid sequence of SEQ ID NO: 175.

60. The bispecific antibody of any one of claims 16 to 18, wherein the anti-CFHR4 LCDR1 comprises the amino acid sequence of SEQ ID NO: 131; the anti-CFHR4 LCDR2 comprises the amino acid sequence of SEQ ID NO: 154; and the anti-CFHR4 LCDR3 comprises the amino acid sequence of SEQ ID NO: 176.

61. The bispecific antibody of any one of claims 16 to 18, wherein the anti-CFHR4 LCDR1 comprises the amino acid sequence of SEQ ID NO: 132; the anti-CFHR4 LCDR2 comprises the amino acid sequence of SEQ ID NO: 155; and the anti-CFHR4 LCDR3 comprises the amino acid sequence of SEQ ID NO: 177.

62. The bispecific antibody of any one of claims 16 to 18, wherein the anti-CFHR4 LCDR1 comprises the amino acid sequence of SEQ ID NO: 133; the anti-CFHR4 LCDR2 comprises the amino acid sequence of SEQ ID NO: 156; and the anti-CFHR4 LCDR3 comprises the amino acid sequence of SEQ ID NO: 178.

63. The bispecific antibody of any one of claims 16 to 18, wherein the anti-CFHR4 LCDR1 comprises the amino acid sequence of SEQ ID NO: 134; the anti-CFHR4 LCDR2 comprises the amino acid sequence of SEQ ID NO: 157; and the anti-CFHR4 LCDR3 comprises the amino acid sequence of SEQ ID NO: 179.

64. The bispecific antibody of any one of claims 16 to 18, wherein the anti-CFHR4 LCDR1 comprises the amino acid sequence of SEQ ID NO: 135; the anti-CFHR4 LCDR2 comprises the amino acid sequence of SEQ ID NO: 158; and the anti-CFHR4 LCDR3 comprises the amino acid sequence of SEQ ID NO: 180.

65. The bispecific antibody of any one of claims 16 to 18, wherein the anti-CFHR4 LCDR1 comprises the amino acid sequence of SEQ ID NO: 136; the anti-CFHR4 LCDR2 comprises the amino acid sequence of SEQ ID NO: 159; and the anti-CFHR4 LCDR3 comprises the amino acid sequence of SEQ ID NO: 181.

66. The bispecific antibody of any one of claims 16 to 18, wherein the anti-CFHR4 LCDR1 comprises the amino acid sequence of SEQ ID NO: 137; the anti-CFHR4 LCDR2 comprises the amino acid sequence of SEQ ID NO: 160; and the anti-CFHR4 LCDR3 comprises the amino acid sequence of SEQ ID NO: 182.

67. The bispecific antibody of any one of claims 16 to 18, wherein the anti-CFHR4 LCDR1 comprises the amino acid sequence of SEQ ID NO: 138; the anti-CFHR4 LCDR2 comprises the amino acid sequence of SEQ ID NO: 161; and the anti-CFHR4 LCDR3 comprises the amino acid sequence of SEQ ID NO: 183.

68. The bispecific antibody of any one of claims 16 to 18, wherein the anti-CFHR4 LCDR1 comprises the amino acid sequence of SEQ ID NO: 139; the anti-CFHR4 LCDR2 comprises the amino acid sequence of SEQ ID NO: 162; and the anti-CFHR4 LCDR3 comprises the amino acid sequence of SEQ ID NO: 184.

69. The bispecific antibody of any one of claims 16 to 18, wherein the anti-CFHR4 LCDR1 comprises the amino acid sequence of SEQ ID NO: 140; the anti-CFHR4 LCDR2 comprises the amino acid sequence of SEQ ID NO: 163; and the anti-CFHR4 LCDR3 comprises the amino acid sequence of SEQ ID NO: 185.

70. The bispecific antibody of any one of claims 16 to 18, wherein the anti-CFHR4 LCDR1 comprises the amino acid sequence of SEQ ID NO: 141; the anti-CFHR4 LCDR2 comprises the amino acid sequence of SEQ ID NO: 164; and the anti-CFHR4 LCDR3 comprises the amino acid sequence of SEQ ID NO: 186.

71. The bispecific antibody of any one of claims 16 to 18, wherein the anti-CFHR4 LCDR1 comprises the amino acid sequence of SEQ ID NO: 142; the anti-CFHR4 LCDR2 comprises the amino acid sequence of SEQ ID NO: 165; and the anti-CFHR4 LCDR3 comprises the amino acid sequence of SEQ ID NO: 187.

72. The bispecific antibody of any one of claims 16 to 18, wherein the anti-CFHR4 LCDR1 comprises the amino acid sequence of SEQ ID NO: 143; the anti-CFHR4 LCDR2 comprises the amino acid sequence of SEQ ID NO: 166; and the anti-CFHR4 LCDR3 comprises the amino acid sequence of SEQ ID NO: 188.

73. The bispecific antibody of any one of claims 16 to 18, wherein the anti-CFHR4 LCDR1 comprises the amino acid sequence of SEQ ID NO: 144; the anti-CFHR4 LCDR2 comprises the amino acid sequence of SEQ ID NO: 167; and the anti-CFHR4 LCDR3 comprises the amino acid sequence of SEQ ID NO: 189.

74. The bispecific antibody of any one of claims 16 to 18, wherein the anti-CFHR4 LCDR1 comprises the amino acid sequence of SEQ ID NO: 145; the anti-CFHR4 LCDR2 comprises the amino acid sequence of SEQ ID NO: 168; and the anti-CFHR4 LCDR3 comprises the amino acid sequence of SEQ ID NO: 190.

75. The bispecific antibody of any one of claims 16 to 18, wherein the anti-CFHR4 LCDR1 comprises the amino acid sequence of SEQ ID NO: 146; the anti-CFHR4 LCDR2 comprises the amino acid sequence of SEQ ID NO: 169; and the anti-CFHR4 LCDR3 comprises the amino acid sequence of SEQ ID NO: 191.

76. The bispecific antibody of any one of claims 16 to 18, wherein the anti-CFHR4 LCDR1 comprises the amino acid sequence of SEQ ID NO: 147; the anti-CFHR4 LCDR2 comprises the amino acid sequence of SEQ ID NO: 170; and the anti-CFHR4 LCDR3 comprises the amino acid sequence of SEQ ID NO: 192.

77. The bispecific antibody of any one of claims 16 to 18, wherein the anti-CFHR4 LCDR1 comprises the amino acid sequence of SEQ ID NO: 148; the anti-CFHR4 LCDR2 comprises the amino acid sequence of SEQ ID NO: 171; and the anti-CFHR4 LCDR3 comprises the amino acid sequence of SEQ ID NO: 193.

78. The bispecific antibody of any one of claims 16 to 18, wherein the anti-CFHR4 LCDR1 comprises the amino acid sequence of SEQ ID NO: 149; the anti-CFHR4 LCDR2 comprises the amino acid sequence of SEQ ID NO: 172; and the anti-CFHR4 LCDR3 comprises the amino acid sequence of SEQ ID NO: 194.

79. The bispecific antibody of any one of claims 16 to 18, wherein the anti-CFHR4 LCDR1 comprises the amino acid sequence of SEQ ID NO: 150; the anti-CFHR4 LCDR2 comprises the amino acid sequence of SEQ ID NO: 173; and the anti-CFHR4 LCDR3 comprises the amino acid sequence of SEQ ID NO: 195.

80. The bispecific antibody of any one of claims 16 to 18, wherein the anti-CFHR4 LCDR1 comprises the amino acid sequence of SEQ ID NO: 151; the anti-CFHR4 LCDR2 comprises the amino acid sequence of SEQ ID NO: 174; and the anti-CFHR4 LCDR3 comprises the amino acid sequence of SEQ ID NO: 196.

81. The bispecific antibody of any one of claims 16 to 18, wherein the anti-CFHR4 LCDR1 comprises the amino acid sequence of SEQ ID NO: 198; the anti-CFHR4 LCDR2 comprises the amino acid sequence of SEQ ID NO: 201; and the anti-CFHR4 LCDR3 comprises the amino acid sequence of SEQ ID NO: 204.

82. The bispecific antibody of any one of claims 16 to 18, wherein the anti-CFHR4 LCDR1 comprises the amino acid sequence of SEQ ID NO: 199; the anti-CFHR4 LCDR2 comprises the amino acid sequence of SEQ ID NO: 202; and the anti-CFHR4 LCDR3 comprises the amino acid sequence of SEQ ID NO: 205.

83. The bispecific antibody of any one of claims 16 to 18, wherein the anti-CFHR4 LCDR1 comprises the amino acid sequence of SEQ ID NO: 207; the anti-CFHR4 LCDR2 comprises the amino acid sequence of SEQ ID NO: 217; and the anti-CFHR4 LCDR3 comprises the amino acid sequence of SEQ ID NO: 227.

84. The bispecific antibody of any one of claims 16 to 18, wherein the anti-CFHR4 LCDR1 comprises the amino acid sequence of SEQ ID NO: 208; the anti-CFHR4 LCDR2 comprises the amino acid sequence of SEQ ID NO: 218; and the anti-CFHR4 LCDR3 comprises the amino acid sequence of SEQ ID NO: 228.

85. The bispecific antibody of any one of claims 16 to 18, wherein the anti-CFHR4 LCDR1 comprises the amino acid sequence of SEQ ID NO: 209; the anti-CFHR4 LCDR2 comprises the amino acid sequence of SEQ ID NO: 219; and the anti-CFHR4 LCDR3 comprises the amino acid sequence of SEQ ID NO: 229.

86. The bispecific antibody of any one of claims 16 to 18, wherein the anti-CFHR4 LCDR1 comprises the amino acid sequence of SEQ ID NO: 210; the anti-CFHR4 LCDR2 comprises the amino acid sequence of SEQ ID NO: 220; and the anti-CFHR4 LCDR3 comprises the amino acid sequence of SEQ ID NO: 230.

87. The bispecific antibody of any one of claims 16 to 18, wherein the anti-CFHR4 LCDR1 comprises the amino acid sequence of SEQ ID NO: 211; the anti-CFHR4 LCDR2 comprises the amino acid sequence of SEQ ID NO: 221; and the anti-CFHR4 LCDR3 comprises the amino acid sequence of SEQ ID NO: 231.

88. The bispecific antibody of any one of claims 16 to 18, wherein the anti-CFHR4 LCDR1 comprises the amino acid sequence of SEQ ID NO: 212; the anti-CFHR4 LCDR2 comprises the amino acid sequence of SEQ ID NO: 222; and the anti-CFHR4 LCDR3 comprises the amino acid sequence of SEQ ID NO: 232.

89. The bispecific antibody of any one of claims 16 to 18, wherein the anti-CFHR4 LCDR1 comprises the amino acid sequence of SEQ ID NO: 213; the anti-CFHR4 LCDR2 comprises the amino acid sequence of SEQ ID NO: 223; and the anti-CFHR4 LCDR3 comprises the amino acid sequence of SEQ ID NO: 233.

90. The bispecific antibody of any one of claims 16 to 18, wherein the anti-CFHR4 LCDR1 comprises the amino acid sequence of SEQ ID NO: 214; the anti-CFHR4 LCDR2 comprises the amino acid sequence of SEQ ID NO: 224; and the anti-CFHR4 LCDR3 comprises the amino acid sequence of SEQ ID NO: 234.

91. The bispecific antibody of any one of claims 16 to 18, wherein the anti-CFHR4 LCDR1 comprises the amino acid sequence of SEQ ID NO: 215; the anti-CFHR4 LCDR2 comprises the amino acid sequence of SEQ ID NO: 225; and the anti-CFHR4 LCDR3 comprises the amino acid sequence of SEQ ID NO: 235.

92. The bispecific antibody of any one of claims 16 to 18, wherein the anti-CFHR4 LCDR1 comprises the amino acid sequence of SEQ ID NO: 237; the anti-CFHR4 LCDR2 comprises the amino acid sequence of SEQ ID NO: 245; and the anti-CFHR4 LCDR3 comprises the amino acid sequence of SEQ ID NO: 253.

93. The bispecific antibody of any one of claims 16 to 18, wherein the anti-CFHR4 LCDR1 comprises the amino acid sequence of SEQ ID NO: 238; the anti-CFHR4 LCDR2 comprises the amino acid sequence of SEQ ID NO: 246; and the anti-CFHR4 LCDR3 comprises the amino acid sequence of SEQ ID NO: 254.

94. The bispecific antibody of any one of claims 16 to 18, wherein the anti-CFHR4 LCDR1 comprises the amino acid sequence of SEQ ID NO: 239; the anti-CFHR4 LCDR2 comprises the amino acid sequence of SEQ ID NO: 247; and the anti-CFHR4 LCDR3 comprises the amino acid sequence of SEQ ID NO: 255.

95. The bispecific antibody of any one of claims 16 to 18, wherein the anti-CFHR4 LCDR1 comprises the amino acid sequence of SEQ ID NO: 240; the anti-CFHR4 LCDR2 comprises the amino acid sequence of SEQ ID NO: 248; and the anti-CFHR4 LCDR3 comprises the amino acid sequence of SEQ ID NO: 256.

96. The bispecific antibody of any one of claims 16 to 18, wherein the anti-CFHR4 LCDR1 comprises the amino acid sequence of SEQ ID NO: 241; the anti-CFHR4 LCDR2 comprises the amino acid sequence of SEQ ID NO: 249; and the anti-CFHR4 LCDR3 comprises the amino acid sequence of SEQ ID NO: 257.

97. The bispecific antibody of any one of claims 16 to 18, wherein the anti-CFHR4 LCDR1 comprises the amino acid sequence of SEQ ID NO: 242; the anti-CFHR4 LCDR2 comprises the amino acid sequence of SEQ ID NO: 250; and the anti-CFHR4 LCDR3 comprises the amino acid sequence of SEQ ID NO: 258.

98. The bispecific antibody of any one of claims 16 to 18, wherein the anti-CFHR4 LCDR1 comprises the amino acid sequence of SEQ ID NO: 243; the anti-CFHR4 LCDR2 comprises the amino acid sequence of SEQ ID NO: 251; and the anti-CFHR4 LCDR3 comprises the amino acid sequence of SEQ ID NO: 259.

99. The bispecific antibody of any one of claims 16 to 18, wherein the anti-C3 HCDR1 comprises the amino acid sequence of SEQ ID NO: 583; the anti-C3 HCDR2 comprises the amino acid sequence of SEQ ID NO: 602; and the anti-C3 HCDR3 comprises the amino acid sequence of SEQ ID NO: 620.

100. The bispecific antibody of any one of claims 16 to 18, wherein the anti-C3 HCDR1 comprises the amino acid sequence of SEQ ID NO: 584; the anti-C3 HCDR2 comprises the amino acid sequence of SEQ ID NO: 603; and the anti-C3 HCDR3 comprises the amino acid sequence of SEQ ID NO: 621.

101. The bispecific antibody of any one of claims 16 to 18, wherein the anti-C3 HCDR1 comprises the amino acid sequence of SEQ ID NO: 585; the anti-C3 HCDR2 comprises the amino acid sequence of SEQ ID NO: 604; and the anti-C3 HCDR3 comprises the amino acid sequence of SEQ ID NO: 622.

102. The bispecific antibody of any one of claims 16 to 18, wherein the anti-C3 HCDR1 comprises the amino acid sequence of SEQ ID NO: 586; the anti-C3 HCDR2 comprises the amino acid sequence of SEQ ID NO: 605; and the anti-C3 HCDR3 comprises the amino acid sequence of SEQ ID NO: 623.

103. The bispecific antibody of any one of claims 16 to 18, wherein the anti-C3 HCDR1 comprises the amino acid sequence of SEQ ID NO: 587; the anti-C3 HCDR2 comprises the amino acid sequence of SEQ ID NO: 606; and the anti-C3 HCDR3 comprises the amino acid sequence of SEQ ID NO: 624.

104. The bispecific antibody of any one of claims 16 to 18, wherein the anti-C3 HCDR1 comprises the amino acid sequence of SEQ ID NO: 588; the anti-C3 HCDR2 comprises the amino acid sequence of SEQ ID NO: 607; and the anti-C3 HCDR3 comprises the amino acid sequence of SEQ ID NO: 625.

105. The bispecific antibody of any one of claims 16 to 18, wherein the anti-C3 HCDR1 comprises the amino acid sequence of SEQ ID NO: 589; the anti-C3 HCDR2 comprises the amino acid sequence of SEQ ID NO: 608; and the anti-C3 HCDR3 comprises the amino acid sequence of SEQ ID NO: 626.

106. The bispecific antibody of any one of claims 16 to 18, wherein the anti-C3 HCDR1 comprises the amino acid sequence of SEQ ID NO: 590; the anti-C3 HCDR2 comprises the amino acid sequence of SEQ ID NO: 609; and the anti-C3 HCDR3 comprises the amino acid sequence of SEQ ID NO: 627.

107. The bispecific antibody of any one of claims 16 to 18, wherein the anti-C3 HCDR1 comprises the amino acid sequence of SEQ ID NO: 591; the anti-C3 HCDR2 comprises the amino acid sequence of SEQ ID NO: 610; and the anti-C3 HCDR3 comprises the amino acid sequence of SEQ ID NO: 628.

108. The bispecific antibody of any one of claims 16 to 18, wherein the anti-C3 HCDR1 comprises the amino acid sequence of SEQ ID NO: 592; the anti-C3 HCDR2 comprises the amino acid sequence of SEQ ID NO: 611; and the anti-C3 HCDR3 comprises the amino acid sequence of SEQ ID NO: 629.

109. The bispecific antibody of any one of claims 16 to 18, wherein the anti-C3 HCDR1 comprises the amino acid sequence of SEQ ID NO: 593; the anti-C3 HCDR2 comprises the amino acid sequence of SEQ ID NO: 612; and the anti-C3 HCDR3 comprises the amino acid sequence of SEQ ID NO: 630.

110. The bispecific antibody of any one of claims 16 to 18, wherein the anti-C3 HCDR1 comprises the amino acid sequence of SEQ ID NO: 594; the anti-C3 HCDR2 comprises the amino acid sequence of SEQ ID NO: 613; and the anti-C3 HCDR3 comprises the amino acid sequence of SEQ ID NO: 631.

111. The bispecific antibody of any one of claims 16 to 18, wherein the anti-C3 HCDR1 comprises the amino acid sequence of SEQ ID NO: 595; the anti-C3 HCDR2 comprises the amino acid sequence of SEQ ID NO: 614; and the anti-C3 HCDR3 comprises the amino acid sequence of SEQ ID NO: 632.

112. The bispecific antibody of any one of claims 16 to 18, wherein the anti-C3 HCDR1 comprises the amino acid sequence of SEQ ID NO: 596; the anti-C3 HCDR2 comprises the amino acid sequence of SEQ ID NO: 615; and the anti-C3 HCDR3 comprises the amino acid sequence of SEQ ID NO: 633.

113. The bispecific antibody of any one of claims 16 to 18, wherein the anti-C3 HCDR1 comprises the amino acid sequence of SEQ ID NO: 597; the anti-C3 HCDR2 comprises the amino acid sequence of SEQ ID NO: 616; and the anti-C3 HCDR3 comprises the amino acid sequence of SEQ ID NO: 634.

114. The bispecific antibody of any one of claims 16 to 18, wherein the anti-C3 HCDR1 comprises the amino acid sequence of SEQ ID NO: 598; the anti-C3 HCDR2 comprises the amino acid sequence of SEQ ID NO: 617; and the anti-C3 HCDR3 comprises the amino acid sequence of SEQ ID NO: 635.

115. The bispecific antibody of any one of claims 16 to 18, wherein the anti-C3 HCDR1 comprises the amino acid sequence of SEQ ID NO: 599; the anti-C3 HCDR2 comprises the amino acid sequence of SEQ ID NO: 618; and the anti-C3 HCDR3 comprises the amino acid sequence of SEQ ID NO: 636.

116. The bispecific antibody of any one of claims 16 to 18, wherein the anti-C3 HCDR1 comprises the amino acid sequence of SEQ ID NO: 600; the anti-C3 HCDR2 comprises the amino acid sequence of SEQ ID NO: 619; and the anti-C3 HCDR3 comprises the amino acid sequence of SEQ ID NO: 637.

117. The bispecific antibody of any one of claims 16 to 18, wherein the anti-C3 HCDR1 comprises the amino acid sequence of SEQ ID NO: 639; the anti-C3 HCDR2 comprises the amino acid sequence of SEQ ID NO: 652; and the anti-C3 HCDR3 comprises the amino acid sequence of SEQ ID NO: 664.

118. The bispecific antibody of any one of claims 16 to 18, wherein the anti-C3 HCDR1 comprises the amino acid sequence of SEQ ID NO: 640; the anti-C3 HCDR2 comprises the amino acid sequence of SEQ ID NO: 653; and the anti-C3 HCDR3 comprises the amino acid sequence of SEQ ID NO: 665.

119. The bispecific antibody of any one of claims 16 to 18, wherein the anti-C3 HCDR1 comprises the amino acid sequence of SEQ ID NO: 641; the anti-C3 HCDR2 comprises the amino acid sequence of SEQ ID NO: 654; and the anti-C3 HCDR3 comprises the amino acid sequence of SEQ ID NO: 666.

120. The bispecific antibody of any one of claims 16 to 18, wherein the anti-C3 HCDR1 comprises the amino acid sequence of SEQ ID NO: 642; the anti-C3 HCDR2 comprises the amino acid sequence of SEQ ID NO: 655; and the anti-C3 HCDR3 comprises the amino acid sequence of SEQ ID NO: 667.

121. The bispecific antibody of any one of claims 16 to 18, wherein the anti-C3 HCDR1 comprises the amino acid sequence of SEQ ID NO: 643; the anti-C3 HCDR2 comprises the amino acid sequence of SEQ ID NO: 656; and the anti-C3 HCDR3 comprises the amino acid sequence of SEQ ID NO: 668.

122. The bispecific antibody of any one of claims 16 to 18, wherein the anti-C3 HCDR1 comprises the amino acid sequence of SEQ ID NO: 644; the anti-C3 HCDR2 comprises the amino acid sequence of SEQ ID NO: 657; and the anti-C3 HCDR3 comprises the amino acid sequence of SEQ ID NO: 669.

123. The bispecific antibody of any one of claims 16 to 18, wherein the anti-C3 HCDR1 comprises the amino acid sequence of SEQ ID NO: 645; the anti-C3 HCDR2 comprises the amino acid sequence of SEQ ID NO: 658; and the anti-C3 HCDR3 comprises the amino acid sequence of SEQ ID NO: 670.

124. The bispecific antibody of any one of claims 16 to 18, wherein the anti-C3 HCDR1 comprises the amino acid sequence of SEQ ID NO: 646; the anti-C3 HCDR2 comprises the amino acid sequence of SEQ ID NO: 659; and the anti-C3 HCDR3 comprises the amino acid sequence of SEQ ID NO: 671.

125. The bispecific antibody of any one of claims 16 to 18, wherein the anti-C3 HCDR1 comprises the amino acid sequence of SEQ ID NO: 647; the anti-C3 HCDR2 comprises the amino acid sequence of SEQ ID NO: 660; and the anti-C3 HCDR3 comprises the amino acid sequence of SEQ ID NO: 672.

126. The bispecific antibody of any one of claims 16 to 18, wherein the anti-C3 HCDR1 comprises the amino acid sequence of SEQ ID NO: 648; the anti-C3 HCDR2 comprises the amino acid sequence of SEQ ID NO: 661; and the anti-C3 HCDR3 comprises the amino acid sequence of SEQ ID NO: 673.

127. The bispecific antibody of any one of claims 16 to 18, wherein the anti-C3 HCDR1 comprises the amino acid sequence of SEQ ID NO: 649; the anti-C3 HCDR2 comprises the amino acid sequence of SEQ ID NO: 662; and the anti-C3 HCDR3 comprises the amino acid sequence of SEQ ID NO: 674.

128. The bispecific antibody of any one of claims 16 to 18, wherein the anti-C3 HCDR1 comprises the amino acid sequence of SEQ ID NO: 650; the anti-C3 HCDR2 comprises the amino acid sequence of SEQ ID NO: 663; and the anti-C3 HCDR3 comprises the amino acid sequence of SEQ ID NO: 675.

129. The bispecific antibody of any one of claims 16 to 18, wherein the anti-C3 HCDR1 comprises the amino acid sequence of SEQ ID NO: 677; the anti-C3 HCDR2 comprises the amino acid sequence of SEQ ID NO: 706; and the anti-C3 HCDR3 comprises the amino acid sequence of SEQ ID NO: 734.

130. The bispecific antibody of any one of claims 16 to 18, wherein the anti-C3 HCDR1 comprises the amino acid sequence of SEQ ID NO: 678; the anti-C3 HCDR2 comprises the amino acid sequence of SEQ ID NO: 707; and the anti-C3 HCDR3 comprises the amino acid sequence of SEQ ID NO: 735.

131. The bispecific antibody of any one of claims 16 to 18, wherein the anti-C3 HCDR1 comprises the amino acid sequence of SEQ ID NO: 679; the anti-C3 HCDR2 comprises the amino acid sequence of SEQ ID NO: 708; and the anti-C3 HCDR3 comprises the amino acid sequence of SEQ ID NO: 736.

132. The bispecific antibody of any one of claims 16 to 18, wherein the anti-C3 HCDR1 comprises the amino acid sequence of SEQ ID NO: 680; the anti-C3 HCDR2 comprises the amino acid sequence of SEQ ID NO: 709; and the anti-C3 HCDR3 comprises the amino acid sequence of SEQ ID NO: 737.

133. The bispecific antibody of any one of claims 16 to 18, wherein the anti-C3 HCDR1 comprises the amino acid sequence of SEQ ID NO: 681; the anti-C3 HCDR2 comprises the amino acid sequence of SEQ ID NO: 710; and the anti-C3 HCDR3 comprises the amino acid sequence of SEQ ID NO: 738.

134. The bispecific antibody of any one of claims 16 to 18, wherein the anti-C3 HCDR1 comprises the amino acid sequence of SEQ ID NO: 682; the anti-C3 HCDR2 comprises the amino acid sequence of SEQ ID NO: 711; and the anti-C3 HCDR3 comprises the amino acid sequence of SEQ ID NO: 739.

135. The bispecific antibody of any one of claims 16 to 18, wherein the anti-C3 HCDR1 comprises the amino acid sequence of SEQ ID NO: 683; the anti-C3 HCDR2 comprises the amino acid sequence of SEQ ID NO: 712; and the anti-C3 HCDR3 comprises the amino acid sequence of SEQ ID NO: 740.

136. The bispecific antibody of any one of claims 16 to 18, wherein the anti-C3 HCDR1 comprises the amino acid sequence of SEQ ID NO: 684; the anti-C3 HCDR2 comprises the amino acid sequence of SEQ ID NO: 713; and the anti-C3 HCDR3 comprises the amino acid sequence of SEQ ID NO: 741.

137. The bispecific antibody of any one of claims 16 to 18, wherein the anti-C3 HCDR1 comprises the amino acid sequence of SEQ ID NO: 685; the anti-C3 HCDR2 comprises the amino acid sequence of SEQ ID NO: 714; and the anti-C3 HCDR3 comprises the amino acid sequence of SEQ ID NO: 742.

138. The bispecific antibody of any one of claims 16 to 18, wherein the anti-C3 HCDR1 comprises the amino acid sequence of SEQ ID NO: 686; the anti-C3 HCDR2 comprises the amino acid sequence of SEQ ID NO: 715; and the anti-C3 HCDR3 comprises the amino acid sequence of SEQ ID NO: 743.

139. The bispecific antibody of any one of claims 16 to 18, wherein the anti-C3 HCDR1 comprises the amino acid sequence of SEQ ID NO: 687; the anti-C3 HCDR2 comprises the amino acid sequence of SEQ ID NO: 716; and the anti-C3 HCDR3 comprises the amino acid sequence of SEQ ID NO: 744.

140. The bispecific antibody of any one of claims 16 to 18, wherein the anti-C3 HCDR1 comprises the amino acid sequence of SEQ ID NO: 688; the anti-C3 HCDR2 comprises the amino acid sequence of SEQ ID NO: 717; and the anti-C3 HCDR3 comprises the amino acid sequence of SEQ ID NO: 745.

141. The bispecific antibody of any one of claims 16 to 18, wherein the anti-C3 HCDR1 comprises the amino acid sequence of SEQ ID NO: 689; the anti-C3 HCDR2 comprises the amino acid sequence of SEQ ID NO: 718; and the anti-C3 HCDR3 comprises the amino acid sequence of SEQ ID NO: 746.

142. The bispecific antibody of any one of claims 16 to 18, wherein the anti-C3 HCDR1 comprises the amino acid sequence of SEQ ID NO: 690; the anti-C3 HCDR2 comprises the amino acid sequence of SEQ ID NO: 719; and the anti-C3 HCDR3 comprises the amino acid sequence of SEQ ID NO: 747.

143. The bispecific antibody of any one of claims 16 to 18, wherein the anti-C3 HCDR1 comprises the amino acid sequence of SEQ ID NO: 691; the anti-C3 HCDR2 comprises the amino acid sequence of SEQ ID NO: 720; and the anti-C3 HCDR3 comprises the amino acid sequence of SEQ ID NO: 748.

144. The bispecific antibody of any one of claims 16 to 18, wherein the anti-C3 HCDR1 comprises the amino acid sequence of SEQ ID NO: 692; the anti-C3 HCDR2 comprises the amino acid sequence of SEQ ID NO: 721; and the anti-C3 HCDR3 comprises the amino acid sequence of SEQ ID NO: 749.

145. The bispecific antibody of any one of claims 16 to 18, wherein the anti-C3 HCDR1 comprises the amino acid sequence of SEQ ID NO: 693; the anti-C3 HCDR2 comprises the amino acid sequence of SEQ ID NO: 722; and the anti-C3 HCDR3 comprises the amino acid sequence of SEQ ID NO: 750.

146. The bispecific antibody of any one of claims 16 to 18, wherein the anti-C3 HCDR1 comprises the amino acid sequence of SEQ ID NO: 694; the anti-C3 HCDR2 comprises the amino acid sequence of SEQ ID NO: 723; and the anti-C3 HCDR3 comprises the amino acid sequence of SEQ ID NO: 751.

147. The bispecific antibody of any one of claims 16 to 18, wherein the anti-C3 HCDR1 comprises the amino acid sequence of SEQ ID NO: 695; the anti-C3 HCDR2 comprises the amino acid sequence of SEQ ID NO: 724; and the anti-C3 HCDR3 comprises the amino acid sequence of SEQ ID NO: 752.

148. The bispecific antibody of any one of claims 16 to 18, wherein the anti-C3 HCDR1 comprises the amino acid sequence of SEQ ID NO: 696; the anti-C3 HCDR2 comprises the amino acid sequence of SEQ ID NO: 725; and the anti-C3 HCDR3 comprises the amino acid sequence of SEQ ID NO: 753.

149. The bispecific antibody of any one of claims 16 to 18, wherein the anti-C3 HCDR1 comprises the amino acid sequence of SEQ ID NO: 697; the anti-C3 HCDR2 comprises the amino acid sequence of SEQ ID NO: 726; and the anti-C3 HCDR3 comprises the amino acid sequence of SEQ ID NO: 754.

150. The bispecific antibody of any one of claims 16 to 18, wherein the anti-C3 HCDR1 comprises the amino acid sequence of SEQ ID NO: 698; the anti-C3 HCDR2 comprises the amino acid sequence of SEQ ID NO: 727; and the anti-C3 HCDR3 comprises the amino acid sequence of SEQ ID NO: 755.

151. The bispecific antibody of any one of claims 16 to 18, wherein the anti-C3 HCDR1 comprises the amino acid sequence of SEQ ID NO: 699; the anti-C3 HCDR2 comprises the amino acid sequence of SEQ ID NO: 728; and the anti-C3 HCDR3 comprises the amino acid sequence of SEQ ID NO: 756.

152. The bispecific antibody of any one of claims 16 to 18, wherein the anti-C3 HCDR1 comprises the amino acid sequence of SEQ ID NO: 700; the anti-C3 HCDR2 comprises the amino acid sequence of SEQ ID NO: 729; and the anti-C3 HCDR3 comprises the amino acid sequence of SEQ ID NO: 757.

153. The bispecific antibody of any one of claims 16 to 18, wherein the anti-C3 HCDR1 comprises the amino acid sequence of SEQ ID NO: 701; the anti-C3 HCDR2 comprises the amino acid sequence of SEQ ID NO: 730; and the anti-C3 HCDR3 comprises the amino acid sequence of SEQ ID NO: 758.

154. The bispecific antibody of any one of claims 16 to 18, wherein the anti-C3 HCDR1 comprises the amino acid sequence of SEQ ID NO: 702; the anti-C3 HCDR2 comprises the amino acid sequence of SEQ ID NO: 731; and the anti-C3 HCDR3 comprises the amino acid sequence of SEQ ID NO: 759.

155. The bispecific antibody of any one of claims 16 to 18, wherein the anti-C3 HCDR1 comprises the amino acid sequence of SEQ ID NO: 703; the anti-C3 HCDR2 comprises the amino acid sequence of SEQ ID NO: 732; and the anti-C3 HCDR3 comprises the amino acid sequence of SEQ ID NO: 760.

156. The bispecific antibody of any one of claims 16 to 18, wherein the anti-C3 HCDR1 comprises the amino acid sequence of SEQ ID NO: 704; the anti-C3 HCDR2 comprises the amino acid sequence of SEQ ID NO: 733; and the anti-C3 HCDR3 comprises the amino acid sequence of SEQ ID NO: 761.

157. The bispecific antibody of any one of claims 16 to 18, wherein the anti-C3 HCDR1 comprises the amino acid sequence of SEQ ID NO: 763; the anti-C3 HCDR2 comprises the amino acid sequence of SEQ ID NO: 771; and the anti-C3 HCDR3 comprises the amino acid sequence of SEQ ID NO: 778.

158. The bispecific antibody of any one of claims 16 to 18, wherein the anti-C3 HCDR1 comprises the amino acid sequence of SEQ ID NO: 764; the anti-C3 HCDR2 comprises the amino acid sequence of SEQ ID NO: 772; and the anti-C3 HCDR3 comprises the amino acid sequence of SEQ ID NO: 779.

159. The bispecific antibody of any one of claims 16 to 18, wherein the anti-C3 HCDR1 comprises the amino acid sequence of SEQ ID NO: 765; the anti-C3 HCDR2 comprises the amino acid sequence of SEQ ID NO: 773; and the anti-C3 HCDR3 comprises the amino acid sequence of SEQ ID NO: 780.

160. The bispecific antibody of any one of claims 16 to 18, wherein the anti-C3 HCDR1 comprises the amino acid sequence of SEQ ID NO: 766; the anti-C3 HCDR2 comprises the amino acid sequence of SEQ ID NO: 774; and the anti-C3 HCDR3 comprises the amino acid sequence of SEQ ID NO: 781.

161. The bispecific antibody of any one of claims 16 to 18, wherein the anti-C3 HCDR1 comprises the amino acid sequence of SEQ ID NO: 767; the anti-C3 HCDR2 comprises the amino acid sequence of SEQ ID NO: 775; and the anti-C3 HCDR3 comprises the amino acid sequence of SEQ ID NO: 782.

162. The bispecific antibody of any one of claims 16 to 18, wherein the anti-C3 HCDR1 comprises the amino acid sequence of SEQ ID NO: 768; the anti-C3 HCDR2 comprises the amino acid sequence of SEQ ID NO: 776; and the anti-C3 HCDR3 comprises the amino acid sequence of SEQ ID NO: 783.

163. The bispecific antibody of any one of claims 16 to 18, wherein the anti-C3 HCDR1 comprises the amino acid sequence of SEQ ID NO: 769; the anti-C3 HCDR2 comprises the amino acid sequence of SEQ ID NO: 777; and the anti-C3 HCDR3 comprises the amino acid sequence of SEQ ID NO: 784.

164. The bispecific antibody of any one of claims 16 to 18, wherein the anti-C3 HCDR1 comprises the amino acid sequence of SEQ ID NO: 786; the anti-C3 HCDR2 comprises the amino acid sequence of SEQ ID NO: 794; and the anti-C3 HCDR3 comprises the amino acid sequence of SEQ ID NO: 801.

165. The bispecific antibody of any one of claims 16 to 18, wherein the anti-C3 HCDR1 comprises the amino acid sequence of SEQ ID NO: 787; the anti-C3 HCDR2 comprises the amino acid sequence of SEQ ID NO: 795; and the anti-C3 HCDR3 comprises the amino acid sequence of SEQ ID NO: 802.

166. The bispecific antibody of any one of claims 16 to 18, wherein the anti-C3 HCDR1 comprises the amino acid sequence of SEQ ID NO: 788; the anti-C3 HCDR2 comprises the amino acid sequence of SEQ ID NO: 796; and the anti-C3 HCDR3 comprises the amino acid sequence of SEQ ID NO: 803.

167. The bispecific antibody of any one of claims 16 to 18, wherein the anti-C3 HCDR1 comprises the amino acid sequence of SEQ ID NO: 789; the anti-C3 HCDR2 comprises the amino acid sequence of SEQ ID NO: 797; and the anti-C3 HCDR3 comprises the amino acid sequence of SEQ ID NO: 804.

168. The bispecific antibody of any one of claims 16 to 18, wherein the anti-C3 HCDR1 comprises the amino acid sequence of SEQ ID NO: 790; the anti-C3 HCDR2 comprises the amino acid sequence of SEQ ID NO: 798; and the anti-C3 HCDR3 comprises the amino acid sequence of SEQ ID NO: 805.

169. The bispecific antibody of any one of claims 16 to 18, wherein the anti-C3 HCDR1 comprises the amino acid sequence of SEQ ID NO: 791; the anti-C3 HCDR2 comprises the amino acid sequence of SEQ ID NO: 799; and the anti-C3 HCDR3 comprises the amino acid sequence of SEQ ID NO: 806.

170. The bispecific antibody of any one of claims 16 to 18, wherein the anti-C3 HCDR1 comprises the amino acid sequence of SEQ ID NO: 792; the anti-C3 HCDR2 comprises the amino acid sequence of SEQ ID NO: 800; and the anti-C3 HCDR3 comprises the amino acid sequence of SEQ ID NO: 807.

171. The bispecific antibody of any one of claims 16 to 18, wherein the anti-C3 HCDR1 comprises the amino acid sequence of SEQ ID NO: 809; the anti-C3 HCDR2 comprises the amino acid sequence of SEQ ID NO: 812; and the anti-C3 HCDR3 comprises the amino acid sequence of SEQ ID NO: 815.

172. The bispecific antibody of any one of claims 16 to 18, wherein the anti-C3 HCDR1 comprises the amino acid sequence of SEQ ID NO: 810; the anti-C3 HCDR2 comprises the amino acid sequence of SEQ ID NO: 813; and the anti-C3 HCDR3 comprises the amino acid sequence of SEQ ID NO: 816.

173. The bispecific antibody of any one of claims 16 to 18, wherein the anti-C3 LCDR1 comprises the amino acid sequence of SEQ ID NO: 818; the anti-C3 LCDR2 comprises the amino acid sequence of SEQ ID NO: 850; and the anti-C3 LCDR3 comprises the amino acid sequence of SEQ ID NO: 881.

174. The bispecific antibody of any one of claims 16 to 18, wherein the anti-C3 LCDR1 comprises the amino acid sequence of SEQ ID NO: 819; the anti-C3 LCDR2 comprises the amino acid sequence of SEQ ID NO: 851; and the anti-C3 LCDR3 comprises the amino acid sequence of SEQ ID NO: 882.

175. The bispecific antibody of any one of claims 16 to 18, wherein the anti-C3 LCDR1 comprises the amino acid sequence of SEQ ID NO: 820; the anti-C3 LCDR2 comprises the amino acid sequence of SEQ ID NO: 852; and the anti-C3 LCDR3 comprises the amino acid sequence of SEQ ID NO: 883.

176. The bispecific antibody of any one of claims 16 to 18, wherein the anti-C3 LCDR1 comprises the amino acid sequence of SEQ ID NO: 821; the anti-C3 LCDR2 comprises the amino acid sequence of SEQ ID NO: 853; and the anti-C3 LCDR3 comprises the amino acid sequence of SEQ ID NO: 884.

177. The bispecific antibody of any one of claims 16 to 18, wherein the anti-C3 LCDR1 comprises the amino acid sequence of SEQ ID NO: 822; the anti-C3 LCDR2 comprises the amino acid sequence of SEQ ID NO: 854; and the anti-C3 LCDR3 comprises the amino acid sequence of SEQ ID NO: 885.

178. The bispecific antibody of any one of claims 16 to 18, wherein the anti-C3 LCDR1 comprises the amino acid sequence of SEQ ID NO: 823; the anti-C3 LCDR2 comprises the amino acid sequence of SEQ ID NO: 855; and the anti-C3 LCDR3 comprises the amino acid sequence of SEQ ID NO: 886.

179. The bispecific antibody of any one of claims 16 to 18, wherein the anti-C3 LCDR1 comprises the amino acid sequence of SEQ ID NO: 824; the anti-C3 LCDR2 comprises the amino acid sequence of SEQ ID NO: 856; and the anti-C3 LCDR3 comprises the amino acid sequence of SEQ ID NO: 887.

180. The bispecific antibody of any one of claims 16 to 18, wherein the anti-C3 LCDR1 comprises the amino acid sequence of SEQ ID NO: 825; the anti-C3 LCDR2 comprises the amino acid sequence of SEQ ID NO: 857; and the anti-C3 LCDR3 comprises the amino acid sequence of SEQ ID NO: 888.

181. The bispecific antibody of any one of claims 16 to 18, wherein the anti-C3 LCDR1 comprises the amino acid sequence of SEQ ID NO: 826; the anti-C3 LCDR2 comprises the amino acid sequence of SEQ ID NO: 858; and the anti-C3 LCDR3 comprises the amino acid sequence of SEQ ID NO: 889.

182. The bispecific antibody of any one of claims 16 to 18, wherein the anti-C3 LCDR1 comprises the amino acid sequence of SEQ ID NO: 827; the anti-C3 LCDR2 comprises the amino acid sequence of SEQ ID NO: 859; and the anti-C3 LCDR3 comprises the amino acid sequence of SEQ ID NO: 890.

183. The bispecific antibody of any one of claims 16 to 18, wherein the anti-C3 LCDR1 comprises the amino acid sequence of SEQ ID NO: 828; the anti-C3 LCDR2 comprises the amino acid sequence of SEQ ID NO: 860; and the anti-C3 LCDR3 comprises the amino acid sequence of SEQ ID NO: 891.

184. The bispecific antibody of any one of claims 16 to 18, wherein the anti-C3 LCDR1 comprises the amino acid sequence of SEQ ID NO: 829; the anti-C3 LCDR2 comprises the amino acid sequence of SEQ ID NO: 861; and the anti-C3 LCDR3 comprises the amino acid sequence of SEQ ID NO: 892.

185. The bispecific antibody of any one of claims 16 to 18, wherein the anti-C3 LCDR1 comprises the amino acid sequence of SEQ ID NO: 830; the anti-C3 LCDR2 comprises the amino acid sequence of SEQ ID NO: 862; and the anti-C3 LCDR3 comprises the amino acid sequence of SEQ ID NO: 893.

186. The bispecific antibody of any one of claims 16 to 18, wherein the anti-C3 LCDR1 comprises the amino acid sequence of SEQ ID NO: 831; the anti-C3 LCDR2 comprises the amino acid sequence of SEQ ID NO: 863; and the anti-C3 LCDR3 comprises the amino acid sequence of SEQ ID NO: 894.

187. The bispecific antibody of any one of claims 16 to 18, wherein the anti-C3 LCDR1 comprises the amino acid sequence of SEQ ID NO: 832; the anti-C3 LCDR2 comprises the amino acid sequence of SEQ ID NO: 864; and the anti-C3 LCDR3 comprises the amino acid sequence of SEQ ID NO: 895.

188. The bispecific antibody of any one of claims 16 to 18, wherein the anti-C3 LCDR1 comprises the amino acid sequence of SEQ ID NO: 833; the anti-C3 LCDR2 comprises the amino acid sequence of SEQ ID NO: 865; and the anti-C3 LCDR3 comprises the amino acid sequence of SEQ ID NO: 896.

189. The bispecific antibody of any one of claims 16 to 18, wherein the anti-C3 LCDR1 comprises the amino acid sequence of SEQ ID NO: 834; the anti-C3 LCDR2 comprises the amino acid sequence of SEQ ID NO: 866; and the anti-C3 LCDR3 comprises the amino acid sequence of SEQ ID NO: 897.

190. The bispecific antibody of any one of claims 16 to 18, wherein the anti-C3 LCDR1 comprises the amino acid sequence of SEQ ID NO: 835; the anti-C3 LCDR2 comprises the amino acid sequence of SEQ ID NO: 867; and the anti-C3 LCDR3 comprises the amino acid sequence of SEQ ID NO: 898.

191. The bispecific antibody of any one of claims 16 to 18, wherein the anti-C3 LCDR1 comprises the amino acid sequence of SEQ ID NO: 836; the anti-C3 LCDR2 comprises the amino acid sequence of SEQ ID NO: 868; and the anti-C3 LCDR3 comprises the amino acid sequence of SEQ ID NO: 899.

192. The bispecific antibody of any one of claims 16 to 18, wherein the anti-C3 LCDR1 comprises the amino acid sequence of SEQ ID NO: 837; the anti-C3 LCDR2 comprises the amino acid sequence of SEQ ID NO: 869; and the anti-C3 LCDR3 comprises the amino acid sequence of SEQ ID NO: 900.

193. The bispecific antibody of any one of claims 16 to 18, wherein the anti-C3 LCDR1 comprises the amino acid sequence of SEQ ID NO: 838; the anti-C3 LCDR2 comprises the amino acid sequence of SEQ ID NO: 870; and the anti-C3 LCDR3 comprises the amino acid sequence of SEQ ID NO: 901.

194. The bispecific antibody of any one of claims 16 to 18, wherein the anti-C3 LCDR1 comprises the amino acid sequence of SEQ ID NO: 839; the anti-C3 LCDR2 comprises the amino acid sequence of SEQ ID NO: 871; and the anti-C3 LCDR3 comprises the amino acid sequence of SEQ ID NO: 902.

195. The bispecific antibody of any one of claims 16 to 18, wherein the anti-C3 LCDR1 comprises the amino acid sequence of SEQ ID NO: 840; the anti-C3 LCDR2 comprises the amino acid sequence of SEQ ID NO: 872; and the anti-C3 LCDR3 comprises the amino acid sequence of SEQ ID NO: 903.

196. The bispecific antibody of any one of claims 16 to 18, wherein the anti-C3 LCDR1 comprises the amino acid sequence of SEQ ID NO: 841; the anti-C3 LCDR2 comprises the amino acid sequence of SEQ ID NO: 873; and the anti-C3 LCDR3 comprises the amino acid sequence of SEQ ID NO: 904.

197. The bispecific antibody of any one of claims 16 to 18, wherein the anti-C3 LCDR1 comprises the amino acid sequence of SEQ ID NO: 842; the anti-C3 LCDR2 comprises the amino acid sequence of SEQ ID NO: 874; and the anti-C3 LCDR3 comprises the amino acid sequence of SEQ ID NO: 905.

198. The bispecific antibody of any one of claims 16 to 18, wherein the anti-C3 LCDR1 comprises the amino acid sequence of SEQ ID NO: 843; the anti-C3 LCDR2 comprises the amino acid sequence of SEQ ID NO: 875; and the anti-C3 LCDR3 comprises the amino acid sequence of SEQ ID NO: 906.

199. The bispecific antibody of any one of claims 16 to 18, wherein the anti-C3 LCDR1 comprises the amino acid sequence of SEQ ID NO: 844; the anti-C3 LCDR2 comprises the amino acid sequence of SEQ ID NO: 876; and the anti-C3 LCDR3 comprises the amino acid sequence of SEQ ID NO: 907.

200. The bispecific antibody of any one of claims 16 to 18, wherein the anti-C3 LCDR1 comprises the amino acid sequence of SEQ ID NO: 845; the anti-C3 LCDR2 comprises the amino acid sequence of SEQ ID NO: 877; and the anti-C3 LCDR3 comprises the amino acid sequence of SEQ ID NO: 908.

201. The bispecific antibody of any one of claims 16 to 18, wherein the anti-C3 LCDR1 comprises the amino acid sequence of SEQ ID NO: 846; the anti-C3 LCDR2 comprises the amino acid sequence of SEQ ID NO: 878; and the anti-C3 LCDR3 comprises the amino acid sequence of SEQ ID NO: 909.

202. The bispecific antibody of any one of claims 16 to 18, wherein the anti-C3 LCDR1 comprises the amino acid sequence of SEQ ID NO: 847; the anti-C3 LCDR2 comprises the amino acid sequence of SEQ ID NO: 879; and the anti-C3 LCDR3 comprises the amino acid sequence of SEQ ID NO: 910.

203. The bispecific antibody of any one of claims 16 to 18, wherein the anti-C3 LCDR1 comprises the amino acid sequence of SEQ ID NO: 848; the anti-C3 LCDR2 comprises the amino acid sequence of SEQ ID NO: 880; and the anti-C3 LCDR3 comprises the amino acid sequence of SEQ ID NO: 911.

204. The bispecific antibody of any one of claims 16 to 18, wherein the anti-C3 LCDR1 comprises the amino acid sequence of SEQ ID NO: 913; the anti-C3 LCDR2 comprises the amino acid sequence of SEQ ID NO: 916; and the anti-C3 LCDR3 comprises the amino acid sequence of SEQ ID NO: 919.

205. The bispecific antibody of any one of claims 16 to 18, wherein the anti-C3 LCDR1 comprises the amino acid sequence of SEQ ID NO: 914; the anti-C3 LCDR2 comprises the amino acid sequence of SEQ ID NO: 917; and the anti-C3 LCDR3 comprises the amino acid sequence of SEQ ID NO: 920.

206. The bispecific antibody of any one of claims 16 to 18, wherein the anti-C3 LCDR1 comprises the amino acid sequence of SEQ ID NO: 914; the anti-C3 LCDR2 comprises the amino acid sequence of SEQ ID NO: 917; and the anti-C3 LCDR3 comprises the amino acid sequence of SEQ ID NO: 920.

207. The bispecific antibody of any one of claims 16 to 18, wherein the anti-C3 LCDR1 comprises the amino acid sequence of SEQ ID NO: 922; the anti-C3 LCDR2 comprises the amino acid sequence of SEQ ID NO: 931; and the anti-C3 LCDR3 comprises the amino acid sequence of SEQ ID NO: 940.

208. The bispecific antibody of any one of claims 16 to 18, wherein the anti-C3 LCDR1 comprises the amino acid sequence of SEQ ID NO: 923; the anti-C3 LCDR2 comprises the amino acid sequence of SEQ ID NO: 932; and the anti-C3 LCDR3 comprises the amino acid sequence of SEQ ID NO: 941.

209. The bispecific antibody of any one of claims 16 to 18, wherein the anti-C3 LCDR1 comprises the amino acid sequence of SEQ ID NO: 924; the anti-C3 LCDR2 comprises the amino acid sequence of SEQ ID NO: 933; and the anti-C3 LCDR3 comprises the amino acid sequence of SEQ ID NO: 942.

210. The bispecific antibody of any one of claims 16 to 18, wherein the anti-C3 LCDR1 comprises the amino acid sequence of SEQ ID NO: 925; the anti-C3 LCDR2 comprises the amino acid sequence of SEQ ID NO: 934; and the anti-C3 LCDR3 comprises the amino acid sequence of SEQ ID NO: 943.

211. The bispecific antibody of any one of claims 16 to 18, wherein the anti-C3 LCDR1 comprises the amino acid sequence of SEQ ID NO: 926; the anti-C3 LCDR2 comprises the amino acid sequence of SEQ ID NO: 935; and the anti-C3 LCDR3 comprises the amino acid sequence of SEQ ID NO: 944.

212. The bispecific antibody of any one of claims 16 to 18, wherein the anti-C3 LCDR1 comprises the amino acid sequence of SEQ ID NO: 927; the anti-C3 LCDR2 comprises the amino acid sequence of SEQ ID NO: 936; and the anti-C3 LCDR3 comprises the amino acid sequence of SEQ ID NO: 945.

213. The bispecific antibody of any one of claims 16 to 18, wherein the anti-C3 LCDR1 comprises the amino acid sequence of SEQ ID NO: 928; the anti-C3 LCDR2 comprises the amino acid sequence of SEQ ID NO: 937; and the anti-C3 LCDR3 comprises the amino acid sequence of SEQ ID NO: 946.

214. The bispecific antibody of any one of claims 16 to 18, wherein the anti-C3 LCDR1 comprises the amino acid sequence of SEQ ID NO: 929; the anti-C3 LCDR2 comprises the amino acid sequence of SEQ ID NO: 938; and the anti-C3 LCDR3 comprises the amino acid sequence of SEQ ID NO: 947.

215. The bispecific antibody of any one of claims 16 to 18, wherein the anti-C3 LCDR1 comprises the amino acid sequence of SEQ ID NO: 949; the anti-C3 LCDR2 comprises the amino acid sequence of SEQ ID NO: 984; and the anti-C3 LCDR3 comprises the amino acid sequence of SEQ ID NO: 1019.

216. The bispecific antibody of any one of claims 16 to 18, wherein the anti-C3 LCDR1 comprises the amino acid sequence of SEQ ID NO: 950; the anti-C3 LCDR2 comprises the amino acid sequence of SEQ ID NO: 985; and the anti-C3 LCDR3 comprises the amino acid sequence of SEQ ID NO: 1020.

217. The bispecific antibody of any one of claims 16 to 18, wherein the anti-C3 LCDR1 comprises the amino acid sequence of SEQ ID NO: 951; the anti-C3 LCDR2 comprises the amino acid sequence of SEQ ID NO: 986; and the anti-C3 LCDR3 comprises the amino acid sequence of SEQ ID NO: 1021.

218. The bispecific antibody of any one of claims 16 to 18, wherein the anti-C3 LCDR1 comprises the amino acid sequence of SEQ ID NO: 952; the anti-C3 LCDR2 comprises the amino acid sequence of SEQ ID NO: 987; and the anti-C3 LCDR3 comprises the amino acid sequence of SEQ ID NO: 1022.

219. The bispecific antibody of any one of claims 16 to 18, wherein the anti-C3 LCDR1 comprises the amino acid sequence of SEQ ID NO: 953; the anti-C3 LCDR2 comprises the amino acid sequence of SEQ ID NO: 988; and the anti-C3 LCDR3 comprises the amino acid sequence of SEQ ID NO: 1023.

220. The bispecific antibody of any one of claims 16 to 18, wherein the anti-C3 LCDR1 comprises the amino acid sequence of SEQ ID NO: 954; the anti-C3 LCDR2 comprises the amino acid sequence of SEQ ID NO: 989; and the anti-C3 LCDR3 comprises the amino acid sequence of SEQ ID NO: 1024.

221. The bispecific antibody of any one of claims 16 to 18, wherein the anti-C3 LCDR1 comprises the amino acid sequence of SEQ ID NO: 955; the anti-C3 LCDR2 comprises the amino acid sequence of SEQ ID NO: 990; and the anti-C3 LCDR3 comprises the amino acid sequence of SEQ ID NO: 1025.

222. The bispecific antibody of any one of claims 16 to 18, wherein the anti-C3 LCDR1 comprises the amino acid sequence of SEQ ID NO: 956; the anti-C3 LCDR2 comprises the amino acid sequence of SEQ ID NO: 991; and the anti-C3 LCDR3 comprises the amino acid sequence of SEQ ID NO: 1026.

223. The bispecific antibody of any one of claims 16 to 18, wherein the anti-C3 LCDR1 comprises the amino acid sequence of SEQ ID NO: 957; the anti-C3 LCDR2 comprises the amino acid sequence of SEQ ID NO: 992; and the anti-C3 LCDR3 comprises the amino acid sequence of SEQ ID NO: 1027.

224. The bispecific antibody of any one of claims 16 to 18, wherein the anti-C3 LCDR1 comprises the amino acid sequence of SEQ ID NO: 958; the anti-C3 LCDR2 comprises the amino acid sequence of SEQ ID NO: 993; and the anti-C3 LCDR3 comprises the amino acid sequence of SEQ ID NO: 1028.

225. The bispecific antibody of any one of claims 16 to 18, wherein the anti-C3 LCDR1 comprises the amino acid sequence of SEQ ID NO: 959; the anti-C3 LCDR2 comprises the amino acid sequence of SEQ ID NO: 994; and the anti-C3 LCDR3 comprises the amino acid sequence of SEQ ID NO: 1029.

226. The bispecific antibody of any one of claims 16 to 18, wherein the anti-C3 LCDR1 comprises the amino acid sequence of SEQ ID NO: 960; the anti-C3 LCDR2 comprises the amino acid sequence of SEQ ID NO: 995; and the anti-C3 LCDR3 comprises the amino acid sequence of SEQ ID NO: 1030.

227. The bispecific antibody of any one of claims 16 to 18, wherein the anti-C3 LCDR1 comprises the amino acid sequence of SEQ ID NO: 961; the anti-C3 LCDR2 comprises the amino acid sequence of SEQ ID NO: 996; and the anti-C3 LCDR3 comprises the amino acid sequence of SEQ ID NO: 1031.

228. The bispecific antibody of any one of claims 16 to 18, wherein the anti-C3 LCDR1 comprises the amino acid sequence of SEQ ID NO: 962; the anti-C3 LCDR2 comprises the amino acid sequence of SEQ ID NO: 997; and the anti-C3 LCDR3 comprises the amino acid sequence of SEQ ID NO: 1032.

229. The bispecific antibody of any one of claims 16 to 18, wherein the anti-C3 LCDR1 comprises the amino acid sequence of SEQ ID NO: 963; the anti-C3 LCDR2 comprises the amino acid sequence of SEQ ID NO: 998; and the anti-C3 LCDR3 comprises the amino acid sequence of SEQ ID NO: 1033.

230. The bispecific antibody of any one of claims 16 to 18, wherein the anti-C3 LCDR1 comprises the amino acid sequence of SEQ ID NO: 964; the anti-C3 LCDR2 comprises the amino acid sequence of SEQ ID NO: 999; and the anti-C3 LCDR3 comprises the amino acid sequence of SEQ ID NO: 1034.

231. The bispecific antibody of any one of claims 16 to 18, wherein the anti-C3 LCDR1 comprises the amino acid sequence of SEQ ID NO: 965; the anti-C3 LCDR2 comprises the amino acid sequence of SEQ ID NO: 1000; and the anti-C3 LCDR3 comprises the amino acid sequence of SEQ ID NO: 1035.

232. The bispecific antibody of any one of claims 16 to 18, wherein the anti-C3 LCDR1 comprises the amino acid sequence of SEQ ID NO: 966; the anti-C3 LCDR2 comprises the amino acid sequence of SEQ ID NO: 1001; and the anti-C3 LCDR3 comprises the amino acid sequence of SEQ ID NO: 1036.

233. The bispecific antibody of any one of claims 16 to 18, wherein the anti-C3 LCDR1 comprises the amino acid sequence of SEQ ID NO: 967; the anti-C3 LCDR2 comprises the amino acid sequence of SEQ ID NO: 1002; and the anti-C3 LCDR3 comprises the amino acid sequence of SEQ ID NO: 1037.

234. The bispecific antibody of any one of claims 16 to 18, wherein the anti-C3 LCDR1 comprises the amino acid sequence of SEQ ID NO: 968; the anti-C3 LCDR2 comprises the amino acid sequence of SEQ ID NO: 1003; and the anti-C3 LCDR3 comprises the amino acid sequence of SEQ ID NO: 1038.

235. The bispecific antibody of any one of claims 16 to 18, wherein the anti-C3 LCDR1 comprises the amino acid sequence of SEQ ID NO: 969; the anti-C3 LCDR2 comprises the amino acid sequence of SEQ ID NO: 1004; and the anti-C3 LCDR3 comprises the amino acid sequence of SEQ ID NO: 1039.

236. The bispecific antibody of any one of claims 16 to 18, wherein the anti-C3 LCDR1 comprises the amino acid sequence of SEQ ID NO: 970; the anti-C3 LCDR2 comprises the amino acid sequence of SEQ ID NO: 1005; and the anti-C3 LCDR3 comprises the amino acid sequence of SEQ ID NO: 1040.

237. The bispecific antibody of any one of claims 16 to 18, wherein the anti-C3 LCDR1 comprises the amino acid sequence of SEQ ID NO: 971; the anti-C3 LCDR2 comprises the amino acid sequence of SEQ ID NO: 1006; and the anti-C3 LCDR3 comprises the amino acid sequence of SEQ ID NO: 1041.

238. The bispecific antibody of any one of claims 16 to 18, wherein the anti-C3 LCDR1 comprises the amino acid sequence of SEQ ID NO: 972; the anti-C3 LCDR2 comprises the amino acid sequence of SEQ ID NO: 1007; and the anti-C3 LCDR3 comprises the amino acid sequence of SEQ ID NO: 1042.

239. The bispecific antibody of any one of claims 16 to 18, wherein the anti-C3 LCDR1 comprises the amino acid sequence of SEQ ID NO: 973; the anti-C3 LCDR2 comprises the amino acid sequence of SEQ ID NO: 1008; and the anti-C3 LCDR3 comprises the amino acid sequence of SEQ ID NO: 1043.

240. The bispecific antibody of any one of claims 16 to 18, wherein the anti-C3 LCDR1 comprises the amino acid sequence of SEQ ID NO: 974; the anti-C3 LCDR2 comprises the amino acid sequence of SEQ ID NO: 1009; and the anti-C3 LCDR3 comprises the amino acid sequence of SEQ ID NO: 1044.

241. The bispecific antibody of any one of claims 16 to 18, wherein the anti-C3 LCDR1 comprises the amino acid sequence of SEQ ID NO: 975; the anti-C3 LCDR2 comprises the amino acid sequence of SEQ ID NO: 1010; and the anti-C3 LCDR3 comprises the amino acid sequence of SEQ ID NO: 1045.

242. The bispecific antibody of any one of claims 16 to 18, wherein the anti-C3 LCDR1 comprises the amino acid sequence of SEQ ID NO: 976; the anti-C3 LCDR2 comprises the amino acid sequence of SEQ ID NO: 1011; and the anti-C3 LCDR3 comprises the amino acid sequence of SEQ ID NO: 1046.

243. The bispecific antibody of any one of claims 16 to 18, wherein the anti-C3 LCDR1 comprises the amino acid sequence of SEQ ID NO: 977; the anti-C3 LCDR2 comprises the amino acid sequence of SEQ ID NO: 1012; and the anti-C3 LCDR3 comprises the amino acid sequence of SEQ ID NO: 1047.

244. The bispecific antibody of any one of claims 16 to 18, wherein the anti-C3 LCDR1 comprises the amino acid sequence of SEQ ID NO: 978; the anti-C3 LCDR2 comprises the amino acid sequence of SEQ ID NO: 1013; and the anti-C3 LCDR3 comprises the amino acid sequence of SEQ ID NO: 1048.

245. The bispecific antibody of any one of claims 16 to 18, wherein the anti-C3 LCDR1 comprises the amino acid sequence of SEQ ID NO: 979; the anti-C3 LCDR2 comprises the amino acid sequence of SEQ ID NO: 1014; and the anti-C3 LCDR3 comprises the amino acid sequence of SEQ ID NO: 1049.

246. The bispecific antibody of any one of claims 16 to 18, wherein the anti-C3 LCDR1 comprises the amino acid sequence of SEQ ID NO: 980; the anti-C3 LCDR2 comprises the amino acid sequence of SEQ ID NO: 1015; and the anti-C3 LCDR3 comprises the amino acid sequence of SEQ ID NO: 1050.

247. The bispecific antibody of any one of claims 16 to 18, wherein the anti-C3 LCDR1 comprises the amino acid sequence of SEQ ID NO: 981; the anti-C3 LCDR2 comprises the amino acid sequence of SEQ ID NO: 1016; and the anti-C3 LCDR3 comprises the amino acid sequence of SEQ ID NO: 1051.

248. The bispecific antibody of any one of claims 16 to 18, wherein the anti-C3 LCDR1 comprises the amino acid sequence of SEQ ID NO: 982; the anti-C3 LCDR2 comprises the amino acid sequence of SEQ ID NO: 1017; and the anti-C3 LCDR3 comprises the amino acid sequence of SEQ ID NO: 1052.

249. The bispecific antibody of any one of claims 16 to 18, wherein the anti-CFHR4 VH comprises an amino acid sequence having at least 90% sequence identity to at least one of SEQ ID NOs: 260-265, 284-293, 324-334, and 368-380; and wherein the anti-CFHR4 VL comprises an amino acid sequence having at least 90% sequence identity to at least one of SEQ ID NOs: 272-277, 304-313, 346-356, and 394-406.

250. The bispecific antibody of any one of claims 16 to 18, wherein the anti-C3 VH comprises an amino acid sequence having at least 90% sequence identity to at least one of SEQ ID NOs: 1127-1200; and wherein the anti-C3 VL comprises an amino acid sequence having at least 90% sequence identity to at least one of SEQ ID NOs: 1275-1348.

251. The bispecific antibody of any one of claims 1 to 250, wherein the antibody binds CFHR4 and/or C3 and reduces complement activation.

252. The bispecific antibody of claim 251, wherein the antibody binds CFHR4b and/or C3b and reduces complement activation.

253. The bispecific antibody of any one of claims 1 to 252, wherein the antibody binds human CFHR4 and/or C3 with a Ko of about 100 nM or lower.

254. The bispecific antibody of any one of claims 1 to 253, wherein the antibody comprises a half-life extension moiety.

255. The bispecific antibody of claim 254, wherein the half-life extension moiety comprises a polypeptide that is at least 20 amino acids in length and comprises any combination of G, A, S T, E, and P residues.

256. The antibody of claim 255, wherein the half-life extension polypeptide is attached to the C-terminus or N-terminus of the antibody.

257. A pharmaceutical composition comprising any of the antibodies of claims 1 to 256.

258. The composition of claim 257, wherein the composition is suitable for ocular administration.

259. The composition of claim 258, wherein the ocular administration comprises injection into vitreous fluid.

260. The composition of claim 258, wherein the ocular administration comprises delivering the antibody using a conjunctival insert, a contact lens, a gel, a nanoparticle, a mucoadhesive polymer, an ointment, a solution, a suspension, eye drops, and/or an implant.

261. A method of treating age-related macular degeneration (AMD) comprising administering a pharmaceutical composition comprising an effective amount of the antibody of any one of claims 1 to 256 to a subject in need thereof.

262. The method of claim 261, wherein the pharmaceutical composition is administered ocularly and treats at least one AMD symptom.

263. The method of claim 261, wherein AMD comprises wet AMD.

264. The method of claim 261, wherein AMD comprises dry AMD.

265. The method of any one of claims 261 to 264, wherein the at least one AMD symptom comprises visual distortion, reduced central vision, blurred vision, and/or difficulty adapting to low light.

266. The method of any one of claims 261 to 265, wherein administering the pharmaceutical composition reduces complement activation in the subject's eye.

267. The method of any one of claims 261 to 266, wherein the pharmaceutical composition is administered at a dose ranging from about 0.0001 mg/dose to about 100 mg/dose.

268. The method of any one of claims 261 to 266, wherein the pharmaceutical composition is administered at a dose ranging from about 0.0001 mg/ml to about 100 mg/ml.
